(19) United States
(12) Patent Application Publication
(10) Pub. No.: US 2023/0257453 A1
(43) Pub. Date: Aug. 17, 2023

(54) COLLAGEN-TARGETED FUSION PROTEINS AND ANTIBODIES

(71) Applicant: Proviva Therapeutics (Hong Kong) Limited, Hong Kong (CN)

(72) Inventors: Zijuan LI, Shanghai (CN); Hongxing ZHOU, Bedford, MA (US)

(21) Appl. No.: 18/009,185

(22) PCT Filed: Jun. 11, 2021
(86) PCT No.: PCT/US21/37119

§ 371 Date: Dec. 8, 2022

Related U.S. Application Data
(60) Provisional application No. 63/037,739, filed on Jun. 11, 2020.

(51) Int. Cl. C07K 16/18; C07K 14/55; C07K 14/54; C07K 14/525; C07K 14/56; C12N 15/63

(52) U.S. Cl. CPC C07K 16/18; C07K 14/55; C07K 14/5443; C07K 14/525; C07K 14/5434; C07K 14/5428; C07K 14/56; C07K 14/5418; C12N 15/63; C07K 2317/565; C07K 2317/567

(57) ABSTRACT

Provided are improved antibodies, or antigen-binding fragments thereof, which specifically bind to a denatured human collagen polypeptide at a cryptic collagen epitope (anti-denatured collagen antibodies), and fusion proteins comprising anti-denatured collagen antibodies fused to an effector domain, such as a cytokine or an immunomodulatory antibody.

### CROSS-REFERENCE TO RELATED APPLICATIONS

[0001] This application claims the benefit under 35 U.S.C. § 119(e) to U.S. Provisional Application No. 63/037,739, filed Jun. 11, 2020, which is incorporated by reference in its entirety.

### STATEMENT REGARDING THE SEQUENCE LISTING

[0002] The Sequence Listing associated with this application is provided in text format in lieu of a paper copy, and is hereby incorporated by reference into the specification. The name of the text file containing the Sequence Listing is PRVA_007_01WO_ST25.txt. The text file is about 1,067 KB, created on Jun. 11, 2021, and is being submitted electronically via EFS-Web.

### BACKGROUND

### Technical Field

[0003] The present disclosure relates improved antibodies, or antigen-binding fragments thereof, which specifically bind to a denatured human collagen polypeptide at a cryptic collagen epitope (anti-denatured collagen antibodies), and fusion proteins comprising anti-denatured collagen antibodies fused to an effector domain, such as a cytokine or an immunomodulatory antibody.

### Description of the Related Art

[0004] Cytokine and antibody therapies have utility in a variety of disease indications. For instance, Interleukin-2 (IL-2) and interleukin-15 (IL-15) immunotherapies have proven utility in the treatment of cancers such as malignant melanoma and renal cell cancer, and chronic infections such as HIV infections.

[0005] However, there are certain problems associated with most IL-2 and IL-15 therapies. For example, current forms of IL-2 therapy have a short half-life in circulation and predominantly expand immunosuppressive regulatory T cells, or T_{regs} (see, for example, Arenas-Ramirez et al., Trends in Immunology. 36: 763-777, 2015). Moreover, the effects of IL-2 therapy are predominantly systemic, rather than being localized to target tissues, resulting in many severe side effects such as breathing problems, nausea, low blood pressure, loss of appetite, confusion, serious infections, seizures, allergic reactions, heart problems, renal failure, and vascular leak syndrome.

[0006] Similarly, IL-15 has been shown to exhibit a short half-life and high doses can be required to achieve biological responses in vivo, resulting in clinical toxicities and limited anti-tumor responses in patients. IL-15 and IL-15 derivatives are under development to increase therapeutic effectiveness. However, significant drawbacks exist, including high serum Cmax initially causing over-activation of immune system, short PK due to either small molecular size for IL-15 (13-14 kD) or catabolism by the large number of immune cells expressing IL-15 receptors for IL-15 or IL-15 Fc fusion proteins, poor accumulation in the target tumor due to short PK, lack of or ineffective tumor targeting or retention in tumor tissues, and undesirable accumulation and immune activation activities in normal tissues. Nonetheless, IL-2 and IL-15 therapies can be effective, and there is an unmet need in the art to overcome these and other drawbacks.

[0007] Activation of cell surface death receptors of the tumor necrosis factor (TNF) receptor superfamily by the appropriate ligands represents an attractive therapeutic strategy to induce cell death by apoptosis in cancer cells (see, e.g., Palacios et al., Curr Pharm Des. 2014; 20(17):2819-33). As one example, TNF-related apoptosis-inducing ligand (TRAIL, also known as Apo2L) possesses the ability to induce apoptosis selectively in cancer cells, and has demonstrated robust anticancer activity in a number of preclinical studies. However, there are similar problems with TRAIL and other cytokine or ligand-based therapies.

[0008] Attempts to target effector molecules to tumor tissues have been explored. For example, fusion proteins between a monoclonal antibody with binding specificity for tumor cell surface antigens and an effector molecule have been generated to enhance the drug penetration to tumor tissues. However, at least one drawback to this approach includes internalization of the antigen, which limits the bioavailability of the effector molecule and thus its ability to signal effector cells. Non-cellular target-mediated effector molecule targeting has also been explored, for example, through attachment of effector molecules to tenascin-C, fibronectin splicing domain, EDB, or collagens. The potential issues with these approaches include the variable target levels in tumor tissues and/or lack of tumor tissue specificity, which leads to insufficient accumulation in tumor tissues and/or insufficient selectivity towards tumor tissues relative to normal tissues, resulting in poor efficacy and higher toxicity.

[0009] Accordingly, there remains a need to optimize the pharmacokinetics and/or biological activities of these and other agents.

### BRIEF SUMMARY

[0010] Embodiments of the present disclosure include fusion protein, comprising

[0011] (a) an antibody, or antigen-binding fragment thereof, which specifically binds to a denatured human collagen type I, II, III, IV, and/or V polypeptide at a cryptic collagen epitope, wherein (a) is fused via a linker to;

[0012] (b) an effector domain.

[0013] In some embodiments, (a) preferentially binds to the denatured human collagen type I, II, III, IV, and/or V polypeptide relative to a corresponding native human collagen polypeptide, optionally wherein (a) has about or at least about 2, 3, 4, 5, 6, 7, 8, 9, 10, 15, 20, 25, 30, 35, 40, 50, 60, 70, 80, 90, or 100-fold higher binding affinity for the denatured human collagen polypeptide than it has for the corresponding native human collagen polypeptide.

[0014] In some embodiments, (a) specifically binds to the denatured human collagen type I, II, III, IV, and V polypeptides at the HU177 cryptic collagen epitope, optionally wherein the HU177 cryptic collagen epitope comprises PGXP, LPGXPG (SEQ ID NO: _), and/or GPP′GXP′G (SEQ ID NO: _), wherein X is any amino acid, and wherein P′ is hydroxylproline. In some embodiments, (a) specifically binds to the denatured human collagen type IV polypeptide at the HUIV26 cryptic collagen epitope.

[0015] In some embodiments, (a) comprises:

[0016] a heavy chain variable (V_{H}) region that comprises complementary determining region V_{H}CDR1, V_{H}CDR2, and V_{H}CDR3 sequences selected from Table A1 and variants thereof which specifically bind to the denatured human collagen polypeptide at the cryptic collagen epitope; and a light chain variable (V_{L}) region that comprises complementary determining region V_{L}CDR1, V_{L}CDR2, and V_{L}CDR3 sequences selected from Table A1 and variants thereof which specifically bind to the denatured human collagen polypeptide at the cryptic collagen epitope.

[0017] In some embodiments, (a) comprises:

[0018] the V_{H}CDR1, a V_{H}CDR2, and V_{H}CDR3 regions respectively comprise SEQ ID NOs: 1-3; and the V_{L}CDR1, V_{L}CDR2, and V_{L}CDR3 regions respectively comprise SEQ ID NOs: 4-6;

[0019] the V_{H}CDR1, a V_{H}CDR2, and V_{H}CDR3 regions respectively comprise SEQ ID NOs: 7-9; and the V_{L}CDR1, V_{L}CDR2, and V_{L}CDR3 regions respectively comprise SEQ ID NOs: 10-12;

[0020] the V_{H}CDR1, a V_{H}CDR2, and V_{H}CDR3 regions respectively comprise SEQ ID NOs: 13-15; and the V_{L}CDR1, V_{L}CDR2, and V_{L}CDR3 regions respectively comprise SEQ ID NOs: 16-18;

[0021] the V_{H}CDR1, a V_{H}CDR2, and V_{H}CDR3 regions respectively comprise SEQ ID NOs: 19-21; and the V_{L}CDR1, V_{L}CDR2, and V_{L}CDR3 regions respectively comprise SEQ ID NOs: 22-24;

[0022] the V_{H}CDR1, a V_{H}CDR2, and V_{H}CDR3 regions respectively comprise SEQ ID NOs: 25-27; and the V_{L}CDR1, V_{L}CDR2, and V_{L}CDR3 regions respectively comprise SEQ ID NOs: 28-30;

[0023] the V_{H}CDR1, a V_{H}CDR2, and V_{H}CDR3 regions respectively comprise SEQ ID NOs: 31-33; and the V_{L}CDR1, V_{L}CDR2, and V_{L}CDR3 regions respectively comprise SEQ ID NOs: 34-36;

[0024] the V_{H}CDR1, a V_{H}CDR2, and V_{H}CDR3 regions respectively comprise SEQ ID NOs: 37-39; and the V_{L}CDR1, V_{L}CDR2, and V_{L}CDR3 regions respectively comprise SEQ ID NOs: 40-42;

[0025] the V_{H}CDR1, a V_{H}CDR2, and V_{H}CDR3 regions respectively comprise SEQ ID NOs: 43-45; and the V_{L}CDR1, V_{L}CDR2, and V_{L}CDR3 regions respectively comprise SEQ ID NOs: 46-48;

[0026] the V_{H}CDR1, a V_{H}CDR2, and V_{H}CDR3 regions respectively comprise SEQ ID NOs: 49-51; and the V_{L}CDR1, V_{L}CDR2, and V_{L}CDR3 regions respectively comprise SEQ ID NOs: 52-54;

[0027] the V_{H}CDR1, a V_{H}CDR2, and V_{H}CDR3 regions respectively comprise SEQ ID NOs: 55-57; and the V_{L}CDR1, V_{L}CDR2, and V_{L}CDR3 regions respectively comprise SEQ ID NOs: 58-60;

[0028] the V_{H}CDR1, a V_{H}CDR2, and V_{H}CDR3 regions respectively comprise SEQ ID NOs: 61-63; and the V_{L}CDR1, V_{L}CDR2, and V_{L}CDR3 regions respectively comprise SEQ ID NOs: 64-66;

[0029] the V_{H}CDR1, a V_{H}CDR2, and V_{H}CDR3 regions respectively comprise SEQ ID NOs: 67-69; and the V_{L}CDR1, V_{L}CDR2, and V_{L}CDR3 regions respectively comprise SEQ ID NOs: 70-72;

[0030] the V_{H}CDR1, a V_{H}CDR2, and V_{H}CDR3 regions respectively comprise SEQ ID NOs: 73-75; and the V_{L}CDR1, V_{L}CDR2, and V_{L}CDR3 regions respectively comprise SEQ ID NOs: 76-78;

[0031] the V_{H}CDR1, a V_{H}CDR2, and V_{H}CDR3 regions respectively comprise SEQ ID NOs: 79-81; and the V_{L}CDR1, V_{L}CDR2, and V_{L}CDR3 regions respectively comprise SEQ ID NOs: 82-84;

[0032] the V_{H}CDR1, a V_{H}CDR2, and V_{H}CDR3 regions respectively comprise SEQ ID NOs: 85-87; and the V_{L}CDR1, V_{L}CDR2, and V_{L}CDR3 regions respectively comprise SEQ ID NOs: 88-90;

[0033] the V_{H}CDR1, a V_{H}CDR2, and V_{H}CDR3 regions respectively comprise SEQ ID NOs: 91-93; and the V_{L}CDR1, V_{L}CDR2, and V_{L}CDR3 regions respectively comprise SEQ ID NOs: 94-96;

[0034] the V_{H}CDR1, a V_{H}CDR2, and V_{H}CDR3 regions respectively comprise SEQ ID NOs: 97-99; and the V_{L}CDR1, V_{L}CDR2, and V_{L}CDR3 regions respectively comprise SEQ ID NOs: 100-102;

[0035] the V_{H}CDR1, a V_{H}CDR2, and V_{H}CDR3 regions respectively comprise SEQ ID NOs: 103-105; and the V_{L}CDR1, V_{L}CDR2, and V_{L}CDR3 regions respectively comprise SEQ ID NOs: 106-108;

[0036] the V_{H}CDR1, a V_{H}CDR2, and V_{H}CDR3 regions respectively comprise SEQ ID NOs: 109-111; and the V_{L}CDR1, V_{L}CDR2, and V_{L}CDR3 regions respectively comprise SEQ ID NOs: 112-114;

[0037] the V_{H}CDR1, a V_{H}CDR2, and V_{H}CDR3 regions respectively comprise SEQ ID NOs: 115-117; and the V_{L}CDR1, V_{L}CDR2, and V_{L}CDR3 regions respectively comprise SEQ ID NOs: 118-120;

[0038] the V_{H}CDR1, a V_{H}CDR2, and V_{H}CDR3 regions respectively comprise SEQ ID NOs: 121-123; and the V_{L}CDR1, V_{L}CDR2, and V_{L}CDR3 regions respectively comprise SEQ ID NOs: 124-126;

[0039] the V_{H}CDR1, a V_{H}CDR2, and V_{H}CDR3 regions respectively comprise SEQ ID NOs: 127-129; and the V_{L}CDR1, V_{L}CDR2, and V_{L}CDR3 regions respectively comprise SEQ ID NOs: 130-132;

[0040] the V_{H}CDR1, a V_{H}CDR2, and V_{H}CDR3 regions respectively comprise SEQ ID NOs: 133-135; and the V_{L}CDR1, V_{L}CDR2, and V_{L}CDR3 regions respectively comprise SEQ ID NOs: 136-138;

[0041] the V_{H}CDR1, a V_{H}CDR2, and V_{H}CDR3 regions respectively comprise SEQ ID NOs: 139-141; and the V_{L}CDR1, V_{L}CDR2, and V_{L}CDR3 regions respectively comprise SEQ ID NOs: 142-144;

[0042] the V_{H}CDR1, a V_{H}CDR2, and V_{H}CDR3 regions respectively comprise SEQ ID NOs: 145-147; and the V_{L}CDR1, V_{L}CDR2, and V_{L}CDR3 regions respectively comprise SEQ ID NOs: 148-150;

[0043] the V_{H}CDR1, a V_{H}CDR2, and V_{H}CDR3 regions respectively comprise SEQ ID NOs: 151-153; and the V_{L}CDR1, V_{L}CDR2, and V_{L}CDR3 regions respectively comprise SEQ ID NOs: 154-156;

[0044] the V_{H}CDR1, a V_{H}CDR2, and V_{H}CDR3 regions respectively comprise SEQ ID NOs: 157-159; and the V_{L}CDR1, V_{L}CDR2, and V_{L}CDR3 regions respectively comprise SEQ ID NOs: 160-162;

[0045] the V_{H}CDR1, a V_{H}CDR2, and V_{H}CDR3 regions respectively comprise SEQ ID NOs: 163-165; and the V_{L}CDR1, V_{L}CDR2, and V_{L}CDR3 regions respectively comprise SEQ ID NOs: 166-168;

[0046] the V_{H}CDR1, a V_{H}CDR2, and V_{H}CDR3 regions respectively comprise SEQ ID NOs: 169-171; and the V_{L}CDR1, V_{L}CDR2, and V_{L}CDR3 regions respectively comprise SEQ ID NOs: 172-174;

[0047] the V_{H}CDR1, a V_{H}CDR2, and V_{H}CDR3 regions respectively comprise SEQ ID NOs: 175-177; and the V_{L}CDR1, V_{L}CDR2, and V_{L}CDR3 regions respectively comprise SEQ ID NOs: 178-180;

[0048] the V_{H}CDR1, a V_{H}CDR2, and V_{H}CDR3 regions respectively comprise SEQ ID NOs: 181-183; and the V_{L}CDR1, V_{L}CDR2, and V_{L}CDR3 regions respectively comprise SEQ ID NOs: 184-186;

[0049] the V_{H}CDR1, a V_{H}CDR2, and V_{H}CDR3 regions respectively comprise SEQ ID NOs: 187-189; and the V_{L}CDR1, V_{L}CDR2, and V_{L}CDR3 regions respectively comprise SEQ ID NOs: 190-192;

[0050] the V_{H}CDR1, a V_{H}CDR2, and V_{H}CDR3 regions respectively comprise SEQ ID NOs: 193-195; and the V_{L}CDR1, V_{L}CDR2, and V_{L}CDR3 regions respectively comprise SEQ ID NOs: 196-198;

[0051] the V_{H}CDR1, a V_{H}CDR2, and V_{H}CDR3 regions respectively comprise SEQ ID NOs: 199-201; and the V_{L}CDR1, V_{L}CDR2, and V_{L}CDR3 regions respectively comprise SEQ ID NOs: 202-204;

[0052] the V_{H}CDR1, a V_{H}CDR2, and V_{H}CDR3 regions respectively comprise SEQ ID NOs: 205-207; and the V_{L}CDR1, V_{L}CDR2, and V_{L}CDR3 regions respectively comprise SEQ ID NOs: 208-210;

[0053] the V_{H}CDR1, a V_{H}CDR2, and V_{H}CDR3 regions respectively comprise SEQ ID NOs: 211-213; and the V_{L}CDR1, V_{L}CDR2, and V_{L}CDR3 regions respectively comprise SEQ ID NOs: 214-216;

[0054] the V_{H}CDR1, a V_{H}CDR2, and V_{H}CDR3 regions respectively comprise SEQ ID NOs: 217-219; and the V_{L}CDR1, V_{L}CDR2, and V_{L}CDR3 regions respectively comprise SEQ ID NOs: 220-222;

[0055] the V_{H}CDR1, a V_{H}CDR2, and V_{H}CDR3 regions respectively comprise SEQ ID NOs: 223-225; and the V_{L}CDR1, V_{L}CDR2, and V_{L}CDR3 regions respectively comprise SEQ ID NOs: 226-228;

[0056] the V_{H}CDR1, a V_{H}CDR2, and V_{H}CDR3 regions respectively comprise SEQ ID NOs: 229-231; and the V_{L}CDR1, V_{L}CDR2, and V_{L}CDR3 regions respectively comprise SEQ ID NOs: 232-234;

[0057] the V_{H}CDR1, a V_{H}CDR2, and V_{H}CDR3 regions respectively comprise SEQ ID NOs: 235-237; and the V_{L}CDR1, V_{L}CDR2, and V_{L}CDR3 regions respectively comprise SEQ ID NOs: 238-240;

[0058] the V_{H}CDR1, a V_{H}CDR2, and V_{H}CDR3 regions respectively comprise SEQ ID NOs: 241-243; and the V_{L}CDR1, V_{L}CDR2, and V_{L}CDR3 regions respectively comprise SEQ ID NOs: 244-246;

[0059] the V_{H}CDR1, a V_{H}CDR2, and V_{H}CDR3 regions respectively comprise SEQ ID NOs: 247-249; and the V_{L}CDR1, V_{L}CDR2, and V_{L}CDR3 regions respectively comprise SEQ ID NOs: 250-252;

[0060] the V_{H}CDR1, a V_{H}CDR2, and V_{H}CDR3 regions respectively comprise SEQ ID NOs: 253-255; and the V_{L}CDR1, V_{L}CDR2, and V_{L}CDR3 regions respectively comprise SEQ ID NOs: 256-258;

[0061] the V_{H}CDR1, a V_{H}CDR2, and V_{H}CDR3 regions respectively comprise SEQ ID NOs: 259-261; and the V_{L}CDR1, V_{L}CDR2, and V_{L}CDR3 regions respectively comprise SEQ ID NOs: 262-264; or

[0062] the V_{H}CDR1, a V_{H}CDR2, and V_{H}CDR3 regions respectively comprise SEQ ID NOs: 265-267; and the V_{L}CDR1, V_{L}CDR2, and V_{L}CDR3 regions respectively comprise SEQ ID NOs: 268-270,

[0063] including variants thereof that have 1, 2, 3, 4, 5, or 6 total alterations in one or more of the CDR regions and which specifically bind to the denatured human collagen polypeptide at the cryptic collagen epitope.

[0064] In some embodiments, for (a):

[0065] the heavy chain is at least 80, 85, 90, 95, 97, 98, 99, or 100% identical to a sequence selected from Table A2, including wherein the heavy chain has 1, 2, 3, 4, 5, or 6 alterations in one or more framework regions, and

[0066] the light chain is at least 80, 85, 90, 95, 97, 98, 99, or 100% identical to a sequence selected from Table A2, including wherein the light chain has 1, 2, 3, 4, 5, or 6 alterations in one or more framework regions.

[0067] In some embodiments, for (a):

[0068] the heavy chain comprises a sequence at least 80, 85, 90, 95, 97, 98, 99, or 100% identical to SEQ ID NO: 271, and the light chain comprises a sequence at least 80, 85, 90, 95, 97, 98, 99, or 100% identical to SEQ ID NO: 272;

[0069] the heavy chain comprises a sequence at least 80, 85, 90, 95, 97, 98, 99, or 100% identical to SEQ ID NO: 273, and the light chain comprises a sequence at least 80, 85, 90, 95, 97, 98, 99, or 100% identical to SEQ ID NO: 274;

[0070] the heavy chain comprises a sequence at least 80, 85, 90, 95, 97, 98, 99, or 100% identical to SEQ ID NO: 275, and the light chain comprises a sequence at least 80, 85, 90, 95, 97, 98, 99, or 100% identical to SEQ ID NO: 276;

[0071] the heavy chain comprises a sequence at least 80, 85, 90, 95, 97, 98, 99, or 100% identical to SEQ ID NO: 277, and the light chain comprises a sequence at least 80, 85, 90, 95, 97, 98, 99, or 100% identical to SEQ ID NO: 278;

[0072] the heavy chain comprises a sequence at least 80, 85, 90, 95, 97, 98, 99, or 100% identical to SEQ ID NO: 279, and the light chain comprises a sequence at least 80, 85, 90, 95, 97, 98, 99, or 100% identical to SEQ ID NO: 280;

[0073] the heavy chain comprises a sequence at least 80, 85, 90, 95, 97, 98, 99, or 100% identical to SEQ ID NO: 281, and the light chain comprises a sequence at least 80, 85, 90, 95, 97, 98, 99, or 100% identical to SEQ ID NO: 282;

[0074] the heavy chain comprises a sequence at least 80, 85, 90, 95, 97, 98, 99, or 100% identical to SEQ ID NO: 283, and the light chain comprises a sequence at least 80, 85, 90, 95, 97, 98, 99, or 100% identical to SEQ ID NO: 284;

[0075] the heavy chain comprises a sequence at least 80, 85, 90, 95, 97, 98, 99, or 100% identical to SEQ ID NO: 285, and the light chain comprises a sequence at least 80, 85, 90, 95, 97, 98, 99, or 100% identical to SEQ ID NO: 286;

[0076] the heavy chain comprises a sequence at least 80, 85, 90, 95, 97, 98, 99, or 100% identical to SEQ ID NO: 287, and the light chain comprises a sequence at least 80, 85, 90, 95, 97, 98, 99, or 100% identical to SEQ ID NO: 288;

[0077] the heavy chain comprises a sequence at least 80, 85, 90, 95, 97, 98, 99, or 100% identical to SEQ ID NO: 289, and the light chain comprises a sequence at least 80, 85, 90, 95, 97, 98, 99, or 100% identical to SEQ ID NO: 290;

[0078] the heavy chain comprises a sequence at least 80, 85, 90, 95, 97, 98, 99, or 100% identical to SEQ ID NO: 291, and the light chain comprises a sequence at least 80, 85, 90, 95, 97, 98, 99, or 100% identical to SEQ ID NO: 292;

[0079] the heavy chain comprises a sequence at least 80, 85, 90, 95, 97, 98, 99, or 100% identical to SEQ ID NO: 293, and the light chain comprises a sequence at least 80, 85, 90, 95, 97, 98, 99, or 100% identical to SEQ ID NO: 294;

[0080] the heavy chain comprises a sequence at least 80, 85, 90, 95, 97, 98, 99, or 100% identical to SEQ ID NO: 295, and the light chain comprises a sequence at least 80, 85, 90, 95, 97, 98, 99, or 100% identical to SEQ ID NO: 296;

[0081] the heavy chain comprises a sequence at least 80, 85, 90, 95, 97, 98, 99, or 100% identical to SEQ ID NO: 297, and the light chain comprises a sequence at least 80, 85, 90, 95, 97, 98, 99, or 100% identical to SEQ ID NO: 298;

[0082] the heavy chain comprises a sequence at least 80, 85, 90, 95, 97, 98, 99, or 100% identical to SEQ ID NO: 299, and the light chain comprises a sequence at least 80, 85, 90, 95, 97, 98, 99, or 100% identical to SEQ ID NO: 300;

[0083] the heavy chain comprises a sequence at least 80, 85, 90, 95, 97, 98, 99, or 100% identical to SEQ ID NO: 301, and the light chain comprises a sequence at least 80, 85, 90, 95, 97, 98, 99, or 100% identical to SEQ ID NO: 302;

[0084] the heavy chain comprises a sequence at least 80, 85, 90, 95, 97, 98, 99, or 100% identical to SEQ ID NO: 303, and the light chain comprises a sequence at least 80, 85, 90, 95, 97, 98, 99, or 100% identical to SEQ ID NO: 304;

[0085] the heavy chain comprises a sequence at least 80, 85, 90, 95, 97, 98, 99, or 100% identical to SEQ ID NO: 305, and the light chain comprises a sequence at least 80, 85, 90, 95, 97, 98, 99, or 100% identical to SEQ ID NO: 306;

[0086] the heavy chain comprises a sequence at least 80, 85, 90, 95, 97, 98, 99, or 100% identical to SEQ ID NO: 307, and the light chain comprises a sequence at least 80, 85, 90, 95, 97, 98, 99, or 100% identical to SEQ ID NO: 308;

[0087] the heavy chain comprises a sequence at least 80, 85, 90, 95, 97, 98, 99, or 100% identical to SEQ ID NO: 309, and the light chain comprises a sequence at least 80, 85, 90, 95, 97, 98, 99, or 100% identical to SEQ ID NO: 310;

[0088] the heavy chain comprises a sequence at least 80, 85, 90, 95, 97, 98, 99, or 100% identical to SEQ ID NO: 311, and the light chain comprises a sequence at least 80, 85, 90, 95, 97, 98, 99, or 100% identical to SEQ ID NO: 312;

[0089] the heavy chain comprises a sequence at least 80, 85, 90, 95, 97, 98, 99, or 100% identical to SEQ ID NO: 313, and the light chain comprises a sequence at least 80, 85, 90, 95, 97, 98, 99, or 100% identical to SEQ ID NO: 314;

[0090] the heavy chain comprises a sequence at least 80, 85, 90, 95, 97, 98, 99, or 100% identical to SEQ ID NO: 315, and the light chain comprises a sequence at least 80, 85, 90, 95, 97, 98, 99, or 100% identical to SEQ ID NO: 316;

[0091] the heavy chain comprises a sequence at least 80, 85, 90, 95, 97, 98, 99, or 100% identical to SEQ ID NO: 317, and the light chain comprises a sequence at least 80, 85, 90, 95, 97, 98, 99, or 100% identical to SEQ ID NO: 318;

[0092] the heavy chain comprises a sequence at least 80, 85, 90, 95, 97, 98, 99, or 100% identical to SEQ ID NO: 319, and the light chain comprises a sequence at least 80, 85, 90, 95, 97, 98, 99, or 100% identical to SEQ ID NO: 320;

[0093] the heavy chain comprises a sequence at least 80, 85, 90, 95, 97, 98, 99, or 100% identical to SEQ ID NO: 321, and the light chain comprises a sequence at least 80, 85, 90, 95, 97, 98, 99, or 100% identical to SEQ ID NO: 322;

[0094] the heavy chain comprises a sequence at least 80, 85, 90, 95, 97, 98, 99, or 100% identical to SEQ ID NO: 323, and the light chain comprises a sequence at least 80, 85, 90, 95, 97, 98, 99, or 100% identical to SEQ ID NO: 324;

[0095] the heavy chain comprises a sequence at least 80, 85, 90, 95, 97, 98, 99, or 100% identical to SEQ ID NO: 325, and the light chain comprises a sequence at least 80, 85, 90, 95, 97, 98, 99, or 100% identical to SEQ ID NO: 326;

[0096] the heavy chain comprises a sequence at least 80, 85, 90, 95, 97, 98, 99, or 100% identical to SEQ ID NO: 327, and the light chain comprises a sequence at least 80, 85, 90, 95, 97, 98, 99, or 100% identical to SEQ ID NO: 328;

[0097] the heavy chain comprises a sequence at least 80, 85, 90, 95, 97, 98, 99, or 100% identical to SEQ ID NO: 329, and the light chain comprises a sequence at least 80, 85, 90, 95, 97, 98, 99, or 100% identical to SEQ ID NO: 330;

[0098] the heavy chain comprises a sequence at least 80, 85, 90, 95, 97, 98, 99, or 100% identical to SEQ ID NO: 331, and the light chain comprises a sequence at least 80, 85, 90, 95, 97, 98, 99, or 100% identical to SEQ ID NO: 332;

[0099] the heavy chain comprises a sequence at least 80, 85, 90, 95, 97, 98, 99, or 100% identical to SEQ ID NO: 333, and the light chain comprises a sequence at least 80, 85, 90, 95, 97, 98, 99, or 100% identical to SEQ ID NO: 334;

[0100] the heavy chain comprises a sequence at least 80, 85, 90, 95, 97, 98, 99, or 100% identical to SEQ ID NO: 335, and the light chain comprises a sequence at least 80, 85, 90, 95, 97, 98, 99, or 100% identical to SEQ ID NO: 336;

[0101] the heavy chain comprises a sequence at least 80, 85, 90, 95, 97, 98, 99, or 100% identical to SEQ ID NO: 337, and the light chain comprises a sequence at least 80, 85, 90, 95, 97, 98, 99, or 100% identical to SEQ ID NO: 338;

[0102] the heavy chain comprises a sequence at least 80, 85, 90, 95, 97, 98, 99, or 100% identical to SEQ ID NO: 339, and the light chain comprises a sequence at least 80, 85, 90, 95, 97, 98, 99, or 100% identical to SEQ ID NO: 340;

[0103] the heavy chain comprises a sequence at least 80, 85, 90, 95, 97, 98, 99, or 100% identical to SEQ ID NO: 341, and the light chain comprises a sequence at least 80, 85, 90, 95, 97, 98, 99, or 100% identical to SEQ ID NO: 342;

[0104] the heavy chain comprises a sequence at least 80, 85, 90, 95, 97, 98, 99, or 100% identical to SEQ ID NO: 343, and the light chain comprises a sequence at least 80, 85, 90, 95, 97, 98, 99, or 100% identical to SEQ ID NO: 344;

[0105] the heavy chain comprises a sequence at least 80, 85, 90, 95, 97, 98, 99, or 100% identical to SEQ ID NO: 345, and the light chain comprises a sequence at least 80, 85, 90, 95, 97, 98, 99, or 100% identical to SEQ ID NO: 346;

[0106] the heavy chain comprises a sequence at least 80, 85, 90, 95, 97, 98, 99, or 100% identical to SEQ ID NO: 347, and the light chain comprises a sequence at least 80, 85, 90, 95, 97, 98, 99, or 100% identical to SEQ ID NO: 348;

[0107] the heavy chain comprises a sequence at least 80, 85, 90, 95, 97, 98, 99, or 100% identical to SEQ ID NO: 349, and the light chain comprises a sequence at least 80, 85, 90, 95, 97, 98, 99, or 100% identical to SEQ ID NO: 350;

[0108] the heavy chain comprises a sequence at least 80, 85, 90, 95, 97, 98, 99, or 100% identical to SEQ ID NO: 351, and the light chain comprises a sequence at least 80, 85, 90, 95, 97, 98, 99, or 100% identical to SEQ ID NO: 352;

[0109] the heavy chain comprises a sequence at least 80, 85, 90, 95, 97, 98, 99, or 100% identical to SEQ ID NO: 353, and the light chain comprises a sequence at least 80, 85, 90, 95, 97, 98, 99, or 100% identical to SEQ ID NO: 354; or

[0110] the heavy chain comprises a sequence at least 80, 85, 90, 95, 97, 98, 99, or 100% identical to SEQ ID NO: 355, and the light chain comprises a sequence at least 80, 85, 90, 95, 97, 98, 99, or 100% identical to SEQ ID NO: 356.

[0111] In some embodiments, (a) comprises

[0112] a V_{H} region or heavy chain comprising:
[0113] an HFR1 sequence selected from SEQ ID NOs: 357-361;
[0114] an HFR2 sequence selected from SEQ ID NOs: 362-366;
[0115] an HFR3 sequence selected from SEQ ID NOs: 367-369;
[0116] an HFR4 sequence set forth in SEQ ID NO: 370;
[0117] a V_{H}CDR1 sequence selected from SEQ ID NOs: 371-372;
[0118] a V_{H}CDR2 sequence selected from SEQ ID NOs: 373-374; and
[0119] a V_{H}CDR3 sequence selected from SEQ ID NO: 375,

[0120] and/or a V_{L} region or light chain comprising:
[0121] an LFR1 sequence set forth in SEQ ID NO: 376;
[0122] an LFR2 sequence set forth in SEQ ID NO: 377;
[0123] an LFR3 sequence set forth in SEQ ID NO: 378;
[0124] an LFR4 sequence set forth in SEQ ID NO: 379;
[0125] a V_{L}CDR1 sequence selected from SEQ ID NOs: 380-385;
[0126] a V_{L}CDR2 sequence set forth in SEQ ID NO: 386; and
[0127] a V_{L}CDR3 sequence selected from SEQ ID NOs: 387-388,

[0128] wherein the antibody, or antigen-binding fragment thereof, specifically binds to a human denatured collagen, or wherein (a) comprises
[0129] an HFR1 sequence selected from SEQ ID NOs: 389-390;
[0130] an HFR2 sequence selected from SEQ ID NOs: 391-392;
[0131] an HFR3 sequence set forth in SEQ ID NO: 393;
[0132] an HFR4 sequence set forth in SEQ ID NO: 394;
[0133] a V_{H}CDR1 sequence selected from SEQ ID NOs: 395-397;
[0134] a V_{H}CDR2 sequence selected from SEQ ID NOs: 398-401; and
[0135] a V_{H}CDR3 sequence selected from SEQ ID NOs: 402-405,

[0136] and/or a VL region or light chain comprising:
[0137] an LFR1 sequence set forth in SEQ ID NO: 406;
[0138] an LFR2 sequence set forth in SEQ ID NO: 407;
[0139] an LFR3 sequence set forth in SEQ ID NO: 408;
[0140] an LFR4 sequence set forth in SEQ ID NO: 409;
[0141] a V_{L}CDR1 sequence selected from SEQ ID NOs: 410-412;
[0142] a V_{L}CDR2 set forth in SEQ ID NO: 413; and
[0143] a V_{L}CDR3 set forth in SEQ ID NO: 414,

[0144] wherein the antibody, or antigen-binding fragment thereof, specifically binds to a human denatured collagen.

[0145] In some embodiments, for (b) the effector domain comprises an immune cell-stimulatory ligand or domain, an immune cell-inhibitory ligand or domain, a cytocidal (e.g., tumor cell cytocidal) ligand or domain, or an immunomodulatory or anti-cancer antibody, or antigen-binding fragment thereof. In some embodiments, the effector domain is an IL-2 polypeptide, optionally an IL-2 polypeptide that comprises, consists, or consists essentially of an amino acid sequence that is at least 80, 85, 90, 95, 98, or 100% identical to a sequence selected from Table S1, and wherein the cell receptor is an IL-2Rβ/γc and/or IL-2Rα/β/γc chain present on the surface of an immune cell.

[0146] In some embodiments, the effector domain is an IL-15 polypeptide, optionally an IL-15 polypeptide that comprises, consists, or consists essentially of an amino acid sequence that is at least 80, 85, 90, 95, 98, or 100% identical to a sequence selected from Table S2, and wherein the cell receptor is an IL-15Rβ/γc chain present on the surface of an immune cell. In some embodiments, the effector domain is a hybrid IL-2/IL-15 polypeptide, optionally a hybrid IL-2/IL-15 polypeptide that comprises, consists, or consists essentially of an amino acid sequence that is at least 80, 85, 90, 95, 98, or 100% identical to a sequence selected from Table S3, and wherein the cell receptor is an IL-2Rβ/γc chain, an IL-2Rα/β/γc chain, and/or an IL-15Rβ/γc chain present on the surface of an immune cell.

[0147] In some embodiments, the effector domain is a TNF superfamily ligand polypeptide, optionally wherein the TNF superfamily ligand polypeptide and its corresponding cell receptor(s) are selected from Table T1, optionally wherein:

[0148] (i) the TNF superfamily ligand polypeptide is TRAIL, including single chain trimeric TRAIL, and the cell receptor is selected from Death receptor 4, Death receptor 5, Decoy receptor 1, and decoy receptor 2 present on an immune cell or cancer cell; or

[0149] (ii) the TNF superfamily ligand polypeptide is 4-1BBL, including single chain trimeric 4-1BB, and the cell receptor is 4-1BB (CD137) present on an immune cell or cancer cell. In some embodiments, the TNF superfamily ligand polypeptide comprises, consists, or consists essentially of an amino acid sequence that is at least 80, 85, 90, 95, 98, or 100% identical to a sequence selected from Table S4, and wherein the cell receptor is selected from the corresponding receptor from Table T1.

[0150] In some embodiments, the effector domain is an IL-12 polypeptide, optionally an IL-12 polypeptide that comprises, consists, or consists essentially of an amino acid sequence that is at least 80, 85, 90, 95, 98, or 100% identical to a sequence selected from Table S5, and wherein the cell receptor is an IL-12 receptor, optionally an IL-12Rβ1 and IL-12Rβ2 chain present on the surface of an immune cell. In some embodiments, the effector domain is an IL-10 polypeptide, optionally an IL-10 polypeptide that comprises, consists, or consists essentially of an amino acid sequence that is at least 80, 85, 90, 95, 98, or 100% identical to a sequence selected from Table S6, and wherein the cell receptor is an IL-10 receptor complex comprising IL-10α receptor and IL-10β receptor subunits, optionally wherein the cell receptor is an IL-10α receptor subunit.

[0151] In some embodiments, the effector domain is an IFN-α polypeptide, optionally an IFN-α polypeptide that comprises, consists, or consists essentially of an amino acid sequence that is at least 80, 85, 90, 95, 98, or 100% identical to a sequence selected from Table S7, and wherein the cell receptor is an interferon α/β receptor. In some embodiments, the effector domain is an interleukin-7 (IL-7) polypeptide, optionally an IL-7 polypeptide that comprises, consists, or consists essentially of an amino acid sequence that is at least 80, 85, 90, 95, 98, or 100% identical to a sequence selected from Table S8, and wherein the cell receptor is an IL-7 receptor (IL-7R); or wherein the effector domain is an interleukin-21 (IL-21) polypeptide, optionally an IL-7 polypeptide that comprises, consists, or consists essentially of an amino acid sequence that is at least 80, 85, 90, 95, 98, or 100% identical to a sequence selected from Table S9, and wherein the cell receptor is an IL-21 receptor (IL-21R).

[0152] In some embodiments, the effector domain comprises an immunomodulatory or anti-cancer antibody, or antigen-binding fragment thereof, which specifically binds to a polypeptide selected from human Her2/neu, Her1/EGF receptor (EGFR), EGFR1, EGFR2, EGFR3, Her3, A33 antigen, B7H3, B7H4, CD3, CD4, CD5, CD8, CD16, CD19, CD20, CD30, CD22, CD23 (IgE Receptor), B-cell maturation antigen (BCMA), Trop-2, Claudin 6, claudin 16, MAGE-3, C242 antigen, 5T4, IL-6, IL-13, PD-1, CTLA-4, PD-L1, TIGIT, TIM-3, LAG-3, 4-1BB, vascular endothelial growth factor VEGF (e.g., VEGF-A) VEGFR-1, VEGFR-2, CD27, CD28, CD33, CD37, CD40, CD44, CD51, CD52, CD56, CD74, CD80, CD86, CD137, CD152, CD200, CD221, CCR4, HLA-DR, CTLA-4, NPC-1C, Siglec15, MIC-A, NKG2A, NKG2D, Nkp30, NKp46, tenascin, vimentin, insulin-like growth factor 1 receptor (IGF-1R), alpha-fetoprotein, insulin-like growth factor 1 (IGF-1), carbonic anhydrase 9 (CA-IX), carcinoembryonic antigen (CEA), guanylyl cyclase C, NY-ESO-1, p53, survivin, integrin αvβ3, integrin α5β1, folate receptor 1, transmembrane glycoprotein NMB, fibroblast activation protein alpha (FAP), glycoprotein 75, TAG-72, MUC1, MUC16 (or CA-125), phosphatidylserine, prostate-specific membrane antigen (PSMA), NR-LU-13 antigen, SLAM family member 7 (SLAMF7), EGP40 pancarcinoma antigen, B-cell activating factor (BAFF), platelet-derived growth factor receptor, glycoprotein EpCAM (17-1A), Programmed Death-1, protein disulfide isomerase (PDI), Phosphatase of Regenerating Liver 3 (PRL-3), prostatic acid phosphatase, Lewis-Y antigen, GD2 (a disialoganglioside expressed on tumors of neuroectodermal origin), glypican-3 (GPC3), and mesothelin.

[0153] In some embodiments, (b) is fused via the linker to the N-terminus of the V_{H} region of (a). In some embodiments, (b) is fused via the linker to the N-terminus of the V_{L} region of (a). In some embodiments, (b) is fused via the linker to the C-terminus of (a), optionally the C-terminus of an Fc region of (a).

[0154] In some embodiments, the linker is a flexible, stable linker, optionally selected from Table L1. In some embodiments, the linker is a flexible, cleavable linker, optionally selected from Table L2. In some embodiments, the cleavable linker comprises a protease cleavage site, or is a low pH-sensitive linker. In some embodiments, the protease cleavage site is cleavable by a protease selected from one or more of a metalloprotease, a serine protease, a cysteine protease, and an aspartic acid protease. In some embodiments, the protease cleavage site is cleavable by a protease selected from one or more of MMP1, MMP2, MMP3, MMP4, MMP5, MMP6, MMP7, MMP8, MMP9, MMP10, MMP11, MMP12, MMP13, MMP14, TEV protease, matriptase, uPA, FAP, Legumain, PSA, Kallikrein, Cathepsin A, and Cathepsin B. In some embodiments, the linker is about 1-50 1-40, 1-30, 1-20, 1-10, 1-5, 1-4, 1-3 amino acids in length, or about 1, 2, 3, 4, 5, 6, 7, 8, 9, 10, 11, 12, 13, 14, 15, 16, 17, 18, 19, 20, 21, 22, 23, 24, 25, 26, 27, 28, 29, 30, 31, 32, 33, 34, 35, 36, 37, 38, 39, 40, 41, 42, 43, 44, 45, 46, 47, 48, 49, 50 amino acids in length.

[0155] In some embodiments, binding of (a) to high density denatured collagen in a tissue in vivo, optionally a cancer tissue, increases binding of (b) to its target cell surface receptor or ligand, optionally by about or at least about 10%, 20%, 30%, 40%, 50%, 60%, 70%, 80%, 90%, 100%, 200%, 300%, 400%, 500%, 1000%, 2000%, 3000%, 4000%, or 5000% or more, relative to a control such as the absence or reduced levels of high density denatured collagen. In some embodiments, the cell surface receptor is on the surface of an immune cell or a cancer cell, optionally wherein the immune cell is selected from one or more of a T cell, a B cell, a natural killer cell, a monocyte, and a macrophage.

[0156] In some embodiments, the antibody, or antigen-binding fragment thereof, is a monoclonal antibody and/or a humanized antibody, including wherein the antibody, or antigen-binding fragment thereof, is a whole antibody, a fragment antigen-binding domain (Fab), a F(ab′)2 domain, a single-chain variable fragment (scFv), a dimeric single-chain variable fragment (di-scFv), a single domain antibody (sdAb), or a bi-specific antibody. In some embodiments, the fusion protein, optionally bispecific antibody, comprises, consists, or consists essentially of an amino acid sequence at least 80, 85, 90, 95, 97, 98, 99, or 100% identical to a sequence selected from Table S10.

[0157] Also included are recombinant nucleic acid molecules encoding a fusion protein described herein. Some embodiments include a vector comprising the recombinant nucleic acid molecule.

[0158] Also included are host cells comprising the recombinant nucleic acid molecules and/or the vectors described herein.

[0159] Some embodiments include methods of producing a fusion protein, comprising culturing a host cell described herein under culture conditions suitable for the expression of the fusion protein, and isolating the fusion protein from the culture.

[0160] Some embodiments include a pharmaceutical composition, comprising a fusion protein described herein, and a pharmaceutically acceptable carrier.

[0161] Also included are methods of treating disease in a subject in need thereof, comprising administering to the subject a therapeutically effective amount of a pharmaceutical composition described herein. In some embodiments, the disease is selected from one or more of a cancer, a viral infection, and an immune disorder.

[0162] In some embodiments, the cancer is a primary cancer or a metastatic cancer, and is selected from one or more of melanoma (optionally metastatic melanoma), kidney cancer (optionally renal cell carcinoma), pancreatic cancer, bone cancer, prostate cancer, small cell lung cancer, non-small cell lung cancer (NSCLC), mesothelioma, leukemia (optionally lymphocytic leukemia, chronic myelogenous leukemia, acute myeloid leukemia, or relapsed acute myeloid leukemia), multiple myeloma, lymphoma, hepatoma (hepatocellular carcinoma), sarcoma, B-cell malignancy, breast cancer, ovarian cancer, colorectal cancer, glioma, glioblastoma multiforme, meningioma, pituitary adenoma, vestibular schwannoma, primary CNS lymphoma, primitive neuroectodermal tumor (medulloblastoma), bladder cancer, uterine cancer, esophageal cancer, brain cancer, head and neck cancers, cervical cancer, testicular cancer, thyroid cancer, and stomach cancer.

[0163] In some embodiments, the viral infection is selected from one or more of human immunodeficiency virus (HIV), hepatitis A, hepatitis B, hepatitis C, hepatitis E, caliciviruses associated diarrhoea, rotavirus diarrhoea, Haemophilus influenzae B pneumonia and invasive disease, influenza, measles, mumps, rubella, parainfluenza associated pneumonia, respiratory syncytial virus (RSV) pneumonia, severe acute respiratory syndrome (SARS), human papillomavirus, herpes simplex type 2 genital ulcers, dengue fever, Japanese encephalitis, tick-borne encephalitis, West-Nile virus associated disease, yellow fever, Epstein-Barr virus, Lassa fever, Crimean-Congo haemorrhagic fever, Ebola haemorrhagic fever, Marburg haemorrhagic fever, Rabies, Rift Valley fever, smallpox, upper and lower respiratory infections, and poliomyelitis, optionally wherein the subject is HIV-positive.

[0164] In some embodiments, the effector domain has immune cell-stimulating activity, and wherein immune disorder is selected from one or more of type 1 diabetes, vasculitis, and an immunodeficiency. In some embodiments, the effector domain has immune cell-inhibitory activity, and wherein the immune disorder is an autoimmune and/or inflammatory disease, optionally multiple sclerosis. In some embodiments, following administration, binding of (a) to high density denatured collagen in a tissue in vivo, optionally a cancer tissue, increases binding of the effector domain to its target cell surface receptor or ligand, optionally by about or at least about 10%, 20%, 30%, 40%, 50%, 60%, 70%, 80%, 90%, 100%, 200%, 300%, 400%, 500%, 1000%, 2000%, 3000%, 4000%, or 5000% or more, relative to a control such as the absence or reduced levels of high density denatured collagen. In some embodiments, the cell surface receptor is on the surface of an immune cell or a cancer cell, optionally wherein the immune cell is selected from one or more of a T cell, a B cell, a natural killer cell, a monocyte, and a macrophage.

[0165] In some embodiments, the effector domain has immune cell-stimulatory activity, and wherein administration of the fusion protein increases an immune response in the subject by about or at least about 5, 10, 15, 20, 25, 30, 35, 40, 45, 50, 60, 70, 80, 90, 100, 200, 300, 400, 500, 600, 700, 800, 900, 1000, 2000% or more, relative to a control, optionally wherein the immune response is an anti-cancer or anti-viral immune response. In some embodiments, the effector domain has immune cell-stimulatory activity or cytocidal activity, and wherein administration of the fusion protein increases cell-killing in the subject by about or at least about 5, 10, 15, 20, 25, 30, 35, 40, 45, 50, 60, 70, 80, 90, 100, 200, 300, 400, 500, 600, 700, 800, 900, 1000, 2000% or more, relative to a control, optionally wherein the cell-killing is cancer cell-killing or virally-infected cell-killing. In some embodiments, the effector domain has immune cell-inhibitory activity, and wherein administration of the fusion protein reduces an immune response in the subject by about or at least about 5, 10, 15, 20, 25, 30, 35, 40, 45, 50, 60, 70, 80, 90, 100, 200, 300, 400, 500, 600, 700, 800, 900, 1000, 2000% or more, relative to a control, optionally wherein the immune response is associated with an inflammatory and/or autoimmune disease.

[0166] In some embodiments, the pharmaceutical composition is administered to the subject by parenteral administration. In some embodiments, the parenteral administration is intravenous administration.

[0167] Also included is the use of a pharmaceutical composition described herein in the preparation of a medicament for treating a disease in a subject, optionally wherein the disease is a cancer, a viral infection, or an immune disorder, optionally type 1 diabetes, vasculitis, an immunodeficiency, an inflammatory disease, or an autoimmune disease.

[0168] Also included is a pharmaceutical composition described herein for use in treating a disease in a subject, optionally wherein the disease is a cancer, a viral infection, or an immune disorder, optionally type 1 diabetes, vasculitis, an immunodeficiency, an inflammatory disease, or an autoimmune disease.

[0169] Certain embodiments include an isolated antibody, or an antigen-binding fragment thereof, which specifically binds to a denatured human collagen type I, II, III, IV, and/or V polypeptide at a cryptic collagen epitope, and comprises,

[0170] a heavy chain variable (V_{H}) region that comprises complementary determining region V_{H}CDR1, V_{H}CDR2, and V_{H}CDR3 sequences selected from Table A1 and variants thereof which specifically bind to the human collagen polypeptide at the cryptic collagen epitope; and

[0171] a light chain variable (V_{L}) region that comprises complementary determining region V_{L}CDR1, V_{L}CDR2, and V_{L}CDR3 sequences selected from Table A1 and variants thereof which specifically bind to the human collagen polypeptide at the cryptic collagen epitope,

[0172] excluding the HU177 and HUIV26.

[0173] In some embodiments,

[0174] the V_{H}CDR1, a V_{H}CDR2, and V_{H}CDR3 regions respectively comprise SEQ ID NOs: 1-3; and the V_{L}CDR1, V_{L}CDR2, and V_{L}CDR3 regions respectively comprise SEQ ID NOs: 4-6;

[0175] the V_{H}CDR1, a V_{H}CDR2, and V_{H}CDR3 regions respectively comprise SEQ ID NOs: 7-9; and the V_{L}CDR1, V_{L}CDR2, and V_{L}CDR3 regions respectively comprise SEQ ID NOs: 10-12;

[0176] the V_{H}CDR1, a V_{H}CDR2, and V_{H}CDR3 regions respectively comprise SEQ ID NOs: 13-15; and the V_{L}CDR1, V_{L}CDR2, and V_{L}CDR3 regions respectively comprise SEQ ID NOs: 16-18;

[0177] the V_{H}CDR1, a V_{H}CDR2, and V_{H}CDR3 regions respectively comprise SEQ ID NOs: 19-21; and the V_{L}CDR1, V_{L}CDR2, and V_{L}CDR3 regions respectively comprise SEQ ID NOs: 22-24;

[0178] the V_{H}CDR1, a V_{H}CDR2, and V_{H}CDR3 regions respectively comprise SEQ ID NOs: 25-27; and the V_{L}CDR1, V_{L}CDR2, and V_{L}CDR3 regions respectively comprise SEQ ID NOs: 28-30;

[0179] the V_{H}CDR1, a V_{H}CDR2, and V_{H}CDR3 regions respectively comprise SEQ ID NOs: 31-33; and the V_{L}CDR1, V_{L}CDR2, and V_{L}CDR3 regions respectively comprise SEQ ID NOs: 34-36;

[0180] the V_{H}CDR1, a V_{H}CDR2, and V_{H}CDR3 regions respectively comprise SEQ ID NOs: 37-39; and the V_{L}CDR1, V_{L}CDR2, and V_{L}CDR3 regions respectively comprise SEQ ID NOs: 40-42;

[0181] the V_{H}CDR1, a V_{H}CDR2, and V_{H}CDR3 regions respectively comprise SEQ ID NOs: 43-45; and the V_{L}CDR1, V_{L}CDR2, and V_{L}CDR3 regions respectively comprise SEQ ID NOs: 46-48;

[0182] the V_{H}CDR1, a V_{H}CDR2, and V_{H}CDR3 regions respectively comprise SEQ ID NOs: 49-51; and the V_{L}CDR1, V_{L}CDR2, and V_{L}CDR3 regions respectively comprise SEQ ID NOs: 52-54;

[0183] the V_{H}CDR1, a V_{H}CDR2, and V_{H}CDR3 regions respectively comprise SEQ ID NOs: 55-57; and the V_{L}CDR1, V_{L}CDR2, and V_{L}CDR3 regions respectively comprise SEQ ID NOs: 58-60;

[0184] the V_{H}CDR1, a V_{H}CDR2, and V_{H}CDR3 regions respectively comprise SEQ ID NOs: 61-63; and the V_{L}CDR1, V_{L}CDR2, and V_{L}CDR3 regions respectively comprise SEQ ID NOs: 64-66;

[0185] the V_{H}CDR1, a V_{H}CDR2, and V_{H}CDR3 regions respectively comprise SEQ ID NOs: 67-69; and the V_{L}CDR1, V_{L}CDR2, and V_{L}CDR3 regions respectively comprise SEQ ID NOs: 70-72;

[0186] the V_{H}CDR1, a V_{H}CDR2, and V_{H}CDR3 regions respectively comprise SEQ ID NOs: 73-75; and the V_{L}CDR1, V_{L}CDR2, and V_{L}CDR3 regions respectively comprise SEQ ID NOs: 76-78;

[0187] the V_{H}CDR1, a V_{H}CDR2, and V_{H}CDR3 regions respectively comprise SEQ ID NOs: 79-81; and the V_{L}CDR1, V_{L}CDR2, and V_{L}CDR3 regions respectively comprise SEQ ID NOs: 82-84;

[0188] the V_{H}CDR1, a V_{H}CDR2, and V_{H}CDR3 regions respectively comprise SEQ ID NOs: 85-87; and the V_{L}CDR1, V_{L}CDR2, and V_{L}CDR3 regions respectively comprise SEQ ID NOs: 88-90;

[0189] the V_{H}CDR1, a V_{H}CDR2, and V_{H}CDR3 regions respectively comprise SEQ ID NOs: 91-93; and the V_{L}CDR1, V_{L}CDR2, and V_{L}CDR3 regions respectively comprise SEQ ID NOs: 94-96;

[0190] the V_{H}CDR1, a V_{H}CDR2, and V_{H}CDR3 regions respectively comprise SEQ ID NOs: 97-99; and the V_{L}CDR1, V_{L}CDR2, and V_{L}CDR3 regions respectively comprise SEQ ID NOs: 100-102;

[0191] the V_{H}CDR1, a V_{H}CDR2, and V_{H}CDR3 regions respectively comprise SEQ ID NOs: 103-105; and the V_{L}CDR1, V_{L}CDR2, and V_{L}CDR3 regions respectively comprise SEQ ID NOs: 106-108;

[0192] the V_{H}CDR1, a V_{H}CDR2, and V_{H}CDR3 regions respectively comprise SEQ ID NOs: 109-111; and the V_{L}CDR1, V_{L}CDR2, and V_{L}CDR3 regions respectively comprise SEQ ID NOs: 112-114;

[0193] the V_{H}CDR1, a V_{H}CDR2, and V_{H}CDR3 regions respectively comprise SEQ ID NOs: 115-117; and the V_{L}CDR1, V_{L}CDR2, and V_{L}CDR3 regions respectively comprise SEQ ID NOs: 118-120;

[0194] the V_{H}CDR1, a V_{H}CDR2, and V_{H}CDR3 regions respectively comprise SEQ ID NOs: 121-123; and the V_{L}CDR1, V_{L}CDR2, and V_{L}CDR3 regions respectively comprise SEQ ID NOs: 124-126;

[0195] the V_{H}CDR1, a V_{H}CDR2, and V_{H}CDR3 regions respectively comprise SEQ ID NOs: 127-129; and the V_{L}CDR1, V_{L}CDR2, and V_{L}CDR3 regions respectively comprise SEQ ID NOs: 130-132;

[0196] the V_{H}CDR1, a V_{H}CDR2, and V_{H}CDR3 regions respectively comprise SEQ ID NOs: 133-135; and the V_{L}CDR1, V_{L}CDR2, and V_{L}CDR3 regions respectively comprise SEQ ID NOs: 136-138;

[0197] the V_{H}CDR1, a V_{H}CDR2, and V_{H}CDR3 regions respectively comprise SEQ ID NOs: 139-141; and the V_{L}CDR1, V_{L}CDR2, and V_{L}CDR3 regions respectively comprise SEQ ID NOs: 142-144;

[0198] the V_{H}CDR1, a V_{H}CDR2, and V_{H}CDR3 regions respectively comprise SEQ ID NOs: 145-147; and the V_{L}CDR1, V_{L}CDR2, and V_{L}CDR3 regions respectively comprise SEQ ID NOs: 148-150;

[0199] the V_{H}CDR1, a V_{H}CDR2, and V_{H}CDR3 regions respectively comprise SEQ ID NOs: 151-153; and the V_{L}CDR1, V_{L}CDR2, and V_{L}CDR3 regions respectively comprise SEQ ID NOs: 154-156;

[0200] the V_{H}CDR1, a V_{H}CDR2, and V_{H}CDR3 regions respectively comprise SEQ ID NOs: 157-159; and the V_{L}CDR1, V_{L}CDR2, and V_{L}CDR3 regions respectively comprise SEQ ID NOs: 160-162;

[0201] the V_{H}CDR1, a V_{H}CDR2, and V_{H}CDR3 regions respectively comprise SEQ ID NOs: 163-165; and the V_{L}CDR1, V_{L}CDR2, and V_{L}CDR3 regions respectively comprise SEQ ID NOs: 166-168;

[0202] the V_{H}CDR1, a V_{H}CDR2, and V_{H}CDR3 regions respectively comprise SEQ ID NOs: 169-171; and the V_{L}CDR1, V_{L}CDR2, and V_{L}CDR3 regions respectively comprise SEQ ID NOs: 172-174;

[0203] the V_{H}CDR1, a V_{H}CDR2, and V_{H}CDR3 regions respectively comprise SEQ ID NOs: 175-177; and the V_{L}CDR1, V_{L}CDR2, and V_{L}CDR3 regions respectively comprise SEQ ID NOs: 178-180;

[0204] the V_{H}CDR1, a V_{H}CDR2, and V_{H}CDR3 regions respectively comprise SEQ ID NOs: 181-183; and the V_{L}CDR1, V_{L}CDR2, and V_{L}CDR3 regions respectively comprise SEQ ID NOs: 184-186;

[0205] the V_{H}CDR1, a V_{H}CDR2, and V_{H}CDR3 regions respectively comprise SEQ ID NOs: 187-189; and the V_{L}CDR1, V_{L}CDR2, and V_{L}CDR3 regions respectively comprise SEQ ID NOs: 190-192;

[0206] the V_{H}CDR1, a V_{H}CDR2, and V_{H}CDR3 regions respectively comprise SEQ ID NOs: 193-195; and the V_{L}CDR1, V_{L}CDR2, and V_{L}CDR3 regions respectively comprise SEQ ID NOs: 196-198;

[0207] the V_{H}CDR1, a V_{H}CDR2, and V_{H}CDR3 regions respectively comprise SEQ ID NOs: 199-201; and the V_{L}CDR1, V_{L}CDR2, and V_{L}CDR3 regions respectively comprise SEQ ID NOs: 202-204;

[0208] the V_{H}CDR1, a V_{H}CDR2, and V_{H}CDR3 regions respectively comprise SEQ ID NOs: 205-207; and the V_{L}CDR1, V_{L}CDR2, and V_{L}CDR3 regions respectively comprise SEQ ID NOs: 208-210;

[0209] the V_{H}CDR1, a V_{H}CDR2, and V_{H}CDR3 regions respectively comprise SEQ ID NOs: 211-213; and the V_{L}CDR1, V_{L}CDR2, and V_{L}CDR3 regions respectively comprise SEQ ID NOs: 214-216;

[0210] the V_{H}CDR1, a V_{H}CDR2, and V_{H}CDR3 regions respectively comprise SEQ ID NOs: 217-219; and the V_{L}CDR1, V_{L}CDR2, and V_{L}CDR3 regions respectively comprise SEQ ID NOs: 220-222;

[0211] the V_{H}CDR1, a V_{H}CDR2, and V_{H}CDR3 regions respectively comprise SEQ ID NOs: 223-225; and the V_{L}CDR1, V_{L}CDR2, and V_{L}CDR3 regions respectively comprise SEQ ID NOs: 226-228;

[0212] the V_{H}CDR1, a V_{H}CDR2, and V_{H}CDR3 regions respectively comprise SEQ ID NOs: 229-231; and the V_{L}CDR1, V_{L}CDR2, and V_{L}CDR3 regions respectively comprise SEQ ID NOs: 232-234;

[0213] the V_{H}CDR1, a V_{H}CDR2, and V_{H}CDR3 regions respectively comprise SEQ ID NOs: 235-237; and the V_{L}CDR1, V_{L}CDR2, and V_{L}CDR3 regions respectively comprise SEQ ID NOs: 238-240;

[0214] the V_{H}CDR1, a V_{H}CDR2, and V_{H}CDR3 regions respectively comprise SEQ ID NOs: 241-243; and the V_{L}CDR1, V_{L}CDR2, and V_{L}CDR3 regions respectively comprise SEQ ID NOs: 244-246;

[0215] the V_{H}CDR1, a V_{H}CDR2, and V_{H}CDR3 regions respectively comprise SEQ ID NOs: 247-249; and the V_{L}CDR1, V_{L}CDR2, and V_{L}CDR3 regions respectively comprise SEQ ID NOs: 250-252; or

[0216] the V_{H}CDR1, a V_{H}CDR2, and V_{H}CDR3 regions respectively comprise SEQ ID NOs: 253-255; and the V_{L}CDR1, V_{L}CDR2, and V_{L}CDR3 regions respectively comprise SEQ ID NOs: 256-258;

[0217] including variants thereof that have 1, 2, 3, 4, 5, or 6 total alterations in one or more of the CDR regions and specifically bind to the human collagen polypeptide at the cryptic collagen epitope.

[0218] In some embodiments,

[0219] the heavy chain is at least 80, 85, 90, 95, 97, 98, 99, or 100% identical to a sequence selected from Table A2, including wherein the heavy chain has 1, 2, 3, 4, 5, or 6 alterations in one or more framework regions, and

[0220] the light chain is at least 80, 85, 90, 95, 97, 98, 99, or 100% identical to a sequence selected from Table A2, including wherein the light chain has 1, 2, 3, 4, 5, or 6 alterations in one or more framework regions,

[0221] excluding the HU177 and HUIV26 antibodies.

[0222] In some embodiments,

[0223] the heavy chain comprises a sequence at least 80, 85, 90, 95, 97, 98, 99, or 100% identical to SEQ ID NO: 271, and the light chain comprises a sequence at least 80, 85, 90, 95, 97, 98, 99, or 100% identical to SEQ ID NO: 272;

[0224] the heavy chain comprises a sequence at least 80, 85, 90, 95, 97, 98, 99, or 100% identical to SEQ ID NO: 273, and the light chain comprises a sequence at least 80, 85, 90, 95, 97, 98, 99, or 100% identical to SEQ ID NO: 274;

[0225] the heavy chain comprises a sequence at least 80, 85, 90, 95, 97, 98, 99, or 100% identical to SEQ ID NO: 275, and the light chain comprises a sequence at least 80, 85, 90, 95, 97, 98, 99, or 100% identical to SEQ ID NO: 276;

[0226] the heavy chain comprises a sequence at least 80, 85, 90, 95, 97, 98, 99, or 100% identical to SEQ ID NO: 277, and the light chain comprises a sequence at least 80, 85, 90, 95, 97, 98, 99, or 100% identical to SEQ ID NO: 278;

[0227] the heavy chain comprises a sequence at least 80, 85, 90, 95, 97, 98, 99, or 100% identical to SEQ ID NO: 279, and the light chain comprises a sequence at least 80, 85, 90, 95, 97, 98, 99, or 100% identical to SEQ ID NO: 280;

[0228] the heavy chain comprises a sequence at least 80, 85, 90, 95, 97, 98, 99, or 100% identical to SEQ ID NO: 281, and the light chain comprises a sequence at least 80, 85, 90, 95, 97, 98, 99, or 100% identical to SEQ ID NO: 282;

[0229] the heavy chain comprises a sequence at least 80, 85, 90, 95, 97, 98, 99, or 100% identical to SEQ ID NO: 283, and the light chain comprises a sequence at least 80, 85, 90, 95, 97, 98, 99, or 100% identical to SEQ ID NO: 284;

[0230] the heavy chain comprises a sequence at least 80, 85, 90, 95, 97, 98, 99, or 100% identical to SEQ ID NO: 285, and the light chain comprises a sequence at least 80, 85, 90, 95, 97, 98, 99, or 100% identical to SEQ ID NO: 286;

[0231] the heavy chain comprises a sequence at least 80, 85, 90, 95, 97, 98, 99, or 100% identical to SEQ ID NO: 287, and the light chain comprises a sequence at least 80, 85, 90, 95, 97, 98, 99, or 100% identical to SEQ ID NO: 288;

[0232] the heavy chain comprises a sequence at least 80, 85, 90, 95, 97, 98, 99, or 100% identical to SEQ ID NO: 289, and the light chain comprises a sequence at least 80, 85, 90, 95, 97, 98, 99, or 100% identical to SEQ ID NO: 290;

[0233] the heavy chain comprises a sequence at least 80, 85, 90, 95, 97, 98, 99, or 100% identical to SEQ ID NO: 291, and the light chain comprises a sequence at least 80, 85, 90, 95, 97, 98, 99, or 100% identical to SEQ ID NO: 292;

[0234] the heavy chain comprises a sequence at least 80, 85, 90, 95, 97, 98, 99, or 100% identical to SEQ ID NO: 293, and the light chain comprises a sequence at least 80, 85, 90, 95, 97, 98, 99, or 100% identical to SEQ ID NO: 294;

[0235] the heavy chain comprises a sequence at least 80, 85, 90, 95, 97, 98, 99, or 100% identical to SEQ ID NO: 295, and the light chain comprises a sequence at least 80, 85, 90, 95, 97, 98, 99, or 100% identical to SEQ ID NO: 296;

[0236] the heavy chain comprises a sequence at least 80, 85, 90, 95, 97, 98, 99, or 100% identical to SEQ ID NO: 297, and the light chain comprises a sequence at least 80, 85, 90, 95, 97, 98, 99, or 100% identical to SEQ ID NO: 298;

[0237] the heavy chain comprises a sequence at least 80, 85, 90, 95, 97, 98, 99, or 100% identical to SEQ ID NO: 299, and the light chain comprises a sequence at least 80, 85, 90, 95, 97, 98, 99, or 100% identical to SEQ ID NO: 300;

[0238] the heavy chain comprises a sequence at least 80, 85, 90, 95, 97, 98, 99, or 100% identical to SEQ ID NO: 301, and the light chain comprises a sequence at least 80, 85, 90, 95, 97, 98, 99, or 100% identical to SEQ ID NO: 302;

[0239] the heavy chain comprises a sequence at least 80, 85, 90, 95, 97, 98, 99, or 100% identical to SEQ ID NO: 303, and the light chain comprises a sequence at least 80, 85, 90, 95, 97, 98, 99, or 100% identical to SEQ ID NO: 304;

[0240] the heavy chain comprises a sequence at least 80, 85, 90, 95, 97, 98, 99, or 100% identical to SEQ ID NO: 305, and the light chain comprises a sequence at least 80, 85, 90, 95, 97, 98, 99, or 100% identical to SEQ ID NO: 306;

[0241] the heavy chain comprises a sequence at least 80, 85, 90, 95, 97, 98, 99, or 100% identical to SEQ ID NO: 307, and the light chain comprises a sequence at least 80, 85, 90, 95, 97, 98, 99, or 100% identical to SEQ ID NO: 308;

[0242] the heavy chain comprises a sequence at least 80, 85, 90, 95, 97, 98, 99, or 100% identical to SEQ ID NO: 309, and the light chain comprises a sequence at least 80, 85, 90, 95, 97, 98, 99, or 100% identical to SEQ ID NO: 310;

[0243] the heavy chain comprises a sequence at least 80, 85, 90, 95, 97, 98, 99, or 100% identical to SEQ ID NO: 311, and the light chain comprises a sequence at least 80, 85, 90, 95, 97, 98, 99, or 100% identical to SEQ ID NO: 312;

[0244] the heavy chain comprises a sequence at least 80, 85, 90, 95, 97, 98, 99, or 100% identical to SEQ ID NO: 313, and the light chain comprises a sequence at least 80, 85, 90, 95, 97, 98, 99, or 100% identical to SEQ ID NO: 314;

[0245] the heavy chain comprises a sequence at least 80, 85, 90, 95, 97, 98, 99, or 100% identical to SEQ ID NO: 315, and the light chain comprises a sequence at least 80, 85, 90, 95, 97, 98, 99, or 100% identical to SEQ ID NO: 316;

[0246] the heavy chain comprises a sequence at least 80, 85, 90, 95, 97, 98, 99, or 100% identical to SEQ ID NO: 317, and the light chain comprises a sequence at least 80, 85, 90, 95, 97, 98, 99, or 100% identical to SEQ ID NO: 318;

[0247] the heavy chain comprises a sequence at least 80, 85, 90, 95, 97, 98, 99, or 100% identical to SEQ ID NO: 319, and the light chain comprises a sequence at least 80, 85, 90, 95, 97, 98, 99, or 100% identical to SEQ ID NO: 320;

[0248] the heavy chain comprises a sequence at least 80, 85, 90, 95, 97, 98, 99, or 100% identical to SEQ ID NO: 321, and the light chain comprises a sequence at least 80, 85, 90, 95, 97, 98, 99, or 100% identical to SEQ ID NO: 322;

[0249] the heavy chain comprises a sequence at least 80, 85, 90, 95, 97, 98, 99, or 100% identical to SEQ ID NO: 323, and the light chain comprises a sequence at least 80, 85, 90, 95, 97, 98, 99, or 100% identical to SEQ ID NO: 324;

[0250] the heavy chain comprises a sequence at least 80, 85, 90, 95, 97, 98, 99, or 100% identical to SEQ ID NO: 325, and the light chain comprises a sequence at least 80, 85, 90, 95, 97, 98, 99, or 100% identical to SEQ ID NO: 326;

[0251] the heavy chain comprises a sequence at least 80, 85, 90, 95, 97, 98, 99, or 100% identical to SEQ ID NO: 327, and the light chain comprises a sequence at least 80, 85, 90, 95, 97, 98, 99, or 100% identical to SEQ ID NO: 328;

[0252] the heavy chain comprises a sequence at least 80, 85, 90, 95, 97, 98, 99, or 100% identical to SEQ ID NO: 329, and the light chain comprises a sequence at least 80, 85, 90, 95, 97, 98, 99, or 100% identical to SEQ ID NO: 330;

[0253] the heavy chain comprises a sequence at least 80, 85, 90, 95, 97, 98, 99, or 100% identical to SEQ ID NO: 331, and the light chain comprises a sequence at least 80, 85, 90, 95, 97, 98, 99, or 100% identical to SEQ ID NO: 332;

[0254] the heavy chain comprises a sequence at least 80, 85, 90, 95, 97, 98, 99, or 100% identical to SEQ ID NO: 333, and the light chain comprises a sequence at least 80, 85, 90, 95, 97, 98, 99, or 100% identical to SEQ ID NO: 334;

[0255] the heavy chain comprises a sequence at least 80, 85, 90, 95, 97, 98, 99, or 100% identical to SEQ ID NO: 335, and the light chain comprises a sequence at least 80, 85, 90, 95, 97, 98, 99, or 100% identical to SEQ ID NO: 336;

[0256] the heavy chain comprises a sequence at least 80, 85, 90, 95, 97, 98, 99, or 100% identical to SEQ ID NO: 337, and the light chain comprises a sequence at least 80, 85, 90, 95, 97, 98, 99, or 100% identical to SEQ ID NO: 338;

[0257] the heavy chain comprises a sequence at least 80, 85, 90, 95, 97, 98, 99, or 100% identical to SEQ ID NO: 339, and the light chain comprises a sequence at least 80, 85, 90, 95, 97, 98, 99, or 100% identical to SEQ ID NO: 340;

[0258] the heavy chain comprises a sequence at least 80, 85, 90, 95, 97, 98, 99, or 100% identical to SEQ ID NO: 341, and the light chain comprises a sequence at least 80, 85, 90, 95, 97, 98, 99, or 100% identical to SEQ ID NO: 342;

[0259] the heavy chain comprises a sequence at least 80, 85, 90, 95, 97, 98, 99, or 100% identical to SEQ ID NO: 343, and the light chain comprises a sequence at least 80, 85, 90, 95, 97, 98, 99, or 100% identical to SEQ ID NO: 344;

[0260] the heavy chain comprises a sequence at least 80, 85, 90, 95, 97, 98, 99, or 100% identical to SEQ ID NO: 345, and the light chain comprises a sequence at least 80, 85, 90, 95, 97, 98, 99, or 100% identical to SEQ ID NO: 346;

[0261] the heavy chain comprises a sequence at least 80, 85, 90, 95, 97, 98, 99, or 100% identical to SEQ ID NO: 347, and the light chain comprises a sequence at least 80, 85, 90, 95, 97, 98, 99, or 100% identical to SEQ ID NO: 348;

[0262] the heavy chain comprises a sequence at least 80, 85, 90, 95, 97, 98, 99, or 100% identical to SEQ ID NO: 349, and the light chain comprises a sequence at least 80, 85, 90, 95, 97, 98, 99, or 100% identical to SEQ ID NO: 350;

[0263] the heavy chain comprises a sequence at least 80, 85, 90, 95, 97, 98, 99, or 100% identical to SEQ ID NO: 351, and the light chain comprises a sequence at least 80, 85, 90, 95, 97, 98, 99, or 100% identical to SEQ ID NO: 352;

[0264] the heavy chain comprises a sequence at least 80, 85, 90, 95, 97, 98, 99, or 100% identical to SEQ ID NO: 353, and the light chain comprises a sequence at least 80, 85, 90, 95, 97, 98, 99, or 100% identical to SEQ ID NO: 354; or

[0265] the heavy chain comprises a sequence at least 80, 85, 90, 95, 97, 98, 99, or 100% identical to SEQ ID NO: 355, and the light chain comprises a sequence at least 80, 85, 90, 95, 97, 98, 99, or 100% identical to SEQ ID NO: 356.

[0266] In some embodiments, the isolated antibody, or antigen-binding fragment thereof, comprises a V_{H} region or heavy chain comprising:
[0267] an HFR1 sequence selected from SEQ ID NOs: 357-361;
[0268] an HFR2 sequence selected from SEQ ID NOs: 362-366;
[0269] an HFR3 sequence selected from SEQ ID NOs: 367-369;
[0270] an HFR4 sequence set forth in SEQ ID NO: 370;
[0271] a V_{H}CDR1 sequence selected from SEQ ID NOs: 371-372;
[0272] a V_{H}CDR2 sequence selected from SEQ ID NOs: 373-374; and
[0273] a V_{H}CDR3 sequence selected from SEQ ID NO: 375,

[0274] and/or a V_{L} region or light chain comprising:
[0275] an LFR1 sequence set forth in SEQ ID NO: 376;
[0276] an LFR2 sequence set forth in SEQ ID NO: 377;
[0277] an LFR3 sequence set forth in SEQ ID NO: 378;
[0278] an LFR4 sequence set forth in SEQ ID NO: 379;
[0279] a V_{L}CDR1 sequence selected from SEQ ID NOs: 380-385;
[0280] a V_{L}CDR2 sequence set forth in SEQ ID NO: 386; and
[0281] a V_{L}CDR3 sequence selected from SEQ ID NOs: 387-388,

[0282] wherein the antibody, or antigen-binding fragment thereof, specifically binds to a human denatured collagen, or comprising:
[0283] an HFR1 sequence selected from SEQ ID NOs: 389-390;
[0284] an HFR2 sequence selected from SEQ ID NOs: 391-392;
[0285] an HFR3 sequence set forth in SEQ ID NO: 393;
[0286] an HFR4 sequence set forth in SEQ ID NO: 394;
[0287] a V_{H}CDR1 sequence selected from SEQ ID NOs: 395-397;
[0288] a V_{H}CDR2 sequence selected from SEQ ID NOs: 398-401; and
[0289] a V_{H}CDR3 sequence selected from SEQ ID NOs: 402-405,

[0290] and/or a VL region or light chain comprising:
[0291] an LFR1 sequence set forth in SEQ ID NO: 406;
[0292] an LFR2 sequence set forth in SEQ ID NO: 407;
[0293] an LFR3 sequence set forth in SEQ ID NO: 408;
[0294] an LFR4 sequence set forth in SEQ ID NO: 409;
[0295] a V_{L}CDR1 sequence selected from SEQ ID NOs: 410-412;
[0296] a V_{L}CDR2 set forth in SEQ ID NO: 413; and
[0297] a V_{L}CDR3 set forth in SEQ ID NO: 414,

[0298] wherein the antibody, or antigen-binding fragment thereof, specifically binds to a human denatured collagen.

[0299] In some embodiments, the isolated antibody, or antigen-binding fragment thereof, preferentially binds to the denatured human collagen type I, II, III, IV, and/or V polypeptide relative to a corresponding native human collagen polypeptide, optionally wherein the antibody, or antigen-binding fragment thereof, has about or at least about 2, 3, 4, 5, 6, 7, 8, 9, 10, 15, 20, 25, 30, 35, 40, 50, 60, 70, 80, 90, or 100-fold higher binding affinity for the denatured human collagen polypeptide than it has for the corresponding native human collagen polypeptide.

[0300] In some embodiments, the isolated antibody, or antigen-binding fragment thereof, specifically binds to the denatured human collagen type I, II, III, IV, and V polypeptides at the HU177 cryptic collagen epitope, optionally wherein the cryptic collagen epitope comprises PGXP, LPGXPG (SEQ ID NO: _, and/or GPP′GXP′G (SEQ ID NO: _), wherein X is any amino acid, and wherein P′ is hydroxylproline. In some embodiments, the isolated antibody, or antigen-binding fragment thereof, specifically binds to the denatured human collagen type IV polypeptide at the HUIV26 cryptic collagen epitope.

[0301] In some embodiments, the isolated antibody, or antigen-binding fragment thereof, is a monoclonal antibody and/or a humanized antibody, or a fragment antigen-binding domain (Fab), a F(ab′)2 domain, or a whole antibody. In some embodiments, the isolated antibody, or antigen-binding fragment thereof, is fused via an optional linker to an effector domain.

[0302] Also included are recombinant nucleic acid molecules encoding an antibody, or antigen-binding fragment thereof, described herein, vectors comprising the recombinant nucleic acid molecules, and host cells comprising the recombinant nucleic acid molecules and/or the vectors.

[0303] Certain embodiments include methods of producing an antibody, or antigen-binding fragment thereof, comprising culturing a host cell described herein under culture conditions suitable for the expression of the antibody, or antigen-binding fragment thereof, and isolating the antibody, or antigen-binding fragment thereof, from the culture.

[0304] Certain embodiments include a pharmaceutical or diagnostic composition, comprising an antibody, or antigen-binding fragment thereof, described herein, and a pharmaceutically-acceptable carrier.

### BRIEF DESCRIPTION OF THE DRAWINGS

[0305] FIGS. 1A-1B provide the structural features of an exemplary fusion protein, where the C-terminus of an effector domain is fused to the N-terminus of the light chain (1A) or heavy chain (1B) of an immunoglobulin antigen binding domain (ABD) that binds to human collagen at a cryptic collagen epitope. The N-terminus of an effector domain can also be fused to the C-terminus of the ABD or an Fc region.

[0306] FIGS. 2A-2C illustrate how binding of the anti-collagen ABD to high density structures of denatured tissue collagen (e.g., in vivo) in the target environment increases the local concentration and thus the biological activity of the effector domain in a spatially-regulated manner. In FIGS. 2B-2C, the N-terminus of an effector domain is fused to the C-terminus of the Fc region. FIG. 2C further illustrates the fusion of only one effector domain, and an optional knob-hole feature in the Fc regions of the antibody.

[0307] FIGS. 3A-3B show non-reduced SDS-PAGE (3A) and reduced SDS-PAGE (3B) of purified collagen antibodies. “M” on the figures represents the protein standard marker.

[0308] FIGS. 4A-4D illustrate representative HPLC analysis results of exemplary antibodies purified using protein affinity chromatography.

[0309] FIGS. 5A-5P show dose dependent binding activity and specificity of purified collagen antibodies against human collagens; “dn-hu-collagen I” refers to thermally denatured human collagen I.

[0310] FIGS. 6A-6F show the binding specificity of purified collagen antibodies against denatured and non-denatured human collagens; “n-hu-collagen” refers to native human collagen.

[0311] FIGS. 7A-7H show the binding activity and specificity of purified collagen antibodies against human and mouse collagens; “dn-hu-collagen” refers to thermally denatured human collagen I; “n-hu-collagen” refers to native human collagen.

[0312] FIGS. 8A-8B show non-reduced (8A) and reduced (8B) SDS-PAGE of purified collagen antibody proIL-2 fusion proteins. “M” on the figures represents the protein standard marker.

[0313] FIGS. 9A-9F illustrate representative HPLC analysis profiles of purified antibodies.

[0314] FIGS. 10A-10J show dose dependent binding activity and specificity of purified proIL-2 fusion proteins with respect to collagens.

[0315] FIGS. 11A-11B illustrate the biological activity of anti-collagen antibodies and proIL-2 fusion proteins on M-07e proliferation determined by a colorimetric assay (Cell Counting Kit-8 (CCK-8)). Fusion proteins were digested to completion using proteases as indicted.

[0316] FIGS. 12A-12B show non-reduced (12A) and reduced (12B) SDS-PAGE analysis of purified collagen targeted proIL-15 fusion proteins. “M” on the figures represents the protein standard marker.

[0317] FIGS. 13A-13F illustrate representative HPLC analysis results of purified antibodies.

[0318] FIGS. 14A-14L show the binding activity and specificity of purified proIL-15 fusion proteins with respect to collagens.

[0319] FIGS. 15A-15B illustrate the biological activity of proIL-15 fusion proteins on M-07e proliferation determined by a colorimetric assay (Cell Counting Kit-8 (CCK-8)).

[0320] FIGS. 16A-16E show the amino acid sequences of certain anti-cryptic collagen epitope antibodies described herein. FIGS. 16A-16B and 16D show an alignment of the heavy chains, and FIGS. 16C and 16E show an alignment of the light chains (see also Table E1).

### DETAILED DESCRIPTION

[0321] Embodiments of the present disclosure relate, in part, to improved antibodies, and antigen-binding fragments thereof, which specifically bind to a denatured human collagen type I, III, II, IV, and/or V polypeptide, relative to a corresponding native collagen polypeptide, for example, at a cryptic collagen epitope (anti-denatured collagen antibodies). Certain embodiments include antibodies, and antigen-binding fragments thereof, which specifically bind to both denatured and native forms of human collagens. The improved anti-denatured collagen antibodies described herein can find utility as standalone therapeutic, diagnostic, or research agents (see, for example, Wayhudi et al., J. of Controlled Release. 240:323-331, 2016)), or as part of a fusion protein described herein.

[0322] Certain embodiments thus include a fusion protein, comprising (a) an antibody, or antigen-binding fragment thereof, which specifically binds to a denatured human collagen type I, II, III, IV, and/or V polypeptide at a cryptic collagen epitope, wherein (a) is fused via a linker to; (b) an effector domain such as a cytokine or other ligand, an immunomodulatory antibody, or antigen-binding fragment thereof (for example, an “antagonist” antibody of an immune-inhibitory molecule such as a receptor, or an “agonist” antibody of an immune-stimulatory molecule such as a receptor), or anti-cancer antibody, or antigen-binding fragment thereof. Certain fusion proteins comprise the improved anti-denatured collagen antibodies described herein, and certain fusion proteins comprise other anti-denatured collagen antibodies, including the HU177, HUIV26, or D93 antibodies (see, for example, U.S. Pat. Nos. 8,025,883; and 7,566,770; and Pernasetti et al., Int J Oncol. 29:1371-9, 2006), and antigen-binding fragments and derivatives thereof.

[0323] The fusion proteins can be structured in any orientation, and can have one or two or more effector domains (see FIGS. 1A-1B and FIGS. 2A-2C). For instance, in some fusion proteins the effector domain is fused via the linker to the N-terminus of the V_{H} region of (a), and in some fusion proteins the effector domain is fused via the linker to the N-terminus of the V_{L} region of (a). In some instances, the effector domain is fused via the linker to the C-terminus of (a), for example, the C-terminus of the V_{H} or V_{L} region if (a) is a fragment (e.g., Fab, scFv), or the C-terminus of an Fc region if (a) is a whole antibody or comprises only a partial Fc region. In some instances, binding of (a) to high density collagen in a tissue in vivo, for example, a cancer tissue, increases the localized concentration and/or retention of the fusion protein, and thereby increases the binding/activity of the effector domain in relation to its target, for example, its target cell surface receptor or ligand (see FIGS. 2A-2C). In particular embodiments, a fusion protein comprising an effector domain (for example, a TNF superfamily ligand, or an antibody, or antigen-binding fragment thereof, directed against a TNF superfamily receptor) mediates tumor tissue-localized cross-linking between TNF superfamily receptors, thereby increasing anti-tumor immune responses in the tumor microenvironment. These processes spatially-regulate the activity of the effector domain, to increase or optimize its activity at the desired target site, for example, a site that has a relatively high concentration of denatured tissue collagen in relation to the concentration of native tissue collagen. Exemplary anti-denatured collagen antibodies, effector domains, and linkers are described herein.

[0324] Unless defined otherwise, all technical and scientific terms used herein have the same meaning as commonly understood by those of ordinary skill in the art to which the disclosure belongs. Although any methods, materials, compositions, reagents, cells, similar or equivalent similar or equivalent to those described herein can be used in the practice or testing of the subject matter of the present disclosure, preferred methods and materials are described. All publications and references, including but not limited to patents and patent applications, cited in this specification are herein incorporated by reference in their entirety as if each individual publication or reference were specifically and individually indicated to be incorporated by reference herein as being fully set forth. Any patent application to which this application claims priority is also incorporated by reference herein in its entirety in the manner described above for publications and references.

[0325] Standard techniques may be used for recombinant DNA, oligonucleotide synthesis, and tissue culture and transformation (e.g., electroporation, lipofection). Enzymatic reactions and purification techniques may be performed according to manufacturer's specifications or as commonly accomplished in the art or as described herein. These and related techniques and procedures may be generally performed according to conventional methods well known in the art and as described in various general and more specific references that are cited and discussed throughout the present specification. Unless specific definitions are provided, the nomenclature utilized in connection with, and the laboratory procedures and techniques of, molecular biology, analytical chemistry, synthetic organic chemistry, and medicinal and pharmaceutical chemistry described herein are those well-known and commonly used in the art. Standard techniques may be used for recombinant technology, molecular biological, microbiological, chemical syntheses, chemical analyses, pharmaceutical preparation, formulation, and delivery, and treatment of patients.

[0326] For the purposes of the present disclosure, the following terms are defined below.

[0327] The articles “a” and “an” are used herein to refer to one or to more than one (i.e., to at least one) of the grammatical object of the article. By way of example, “an element” includes “one element”, “one or more elements” and/or “at least one element”.

[0328] By “about” is meant a quantity, level, value, number, frequency, percentage, dimension, size, amount, weight or length that varies by as much as 30, 25, 20, 15, 10, 9, 8, 7, 6, 5, 4, 3, 2 or 1% to a reference quantity, level, value, number, frequency, percentage, dimension, size, amount, weight or length.

[0329] An “antagonist” refers to biological structure or chemical agent that interferes with or otherwise reduces the physiological action of another agent or molecule. In some instances, the antagonist specifically binds to the other agent or molecule. Included are full and partial antagonists.

[0330] An “agonist” refers to biological structure or chemical agent that increases or enhances the physiological action of another agent or molecule. In some instances, the agonist specifically binds to the other agent or molecule. Included are full and partial agonists.

[0331] As used herein, the term “amino acid” is intended to mean both naturally occurring and non-naturally occurring amino acids as well as amino acid analogs and mimetics. Naturally-occurring amino acids include the 20 (L)-amino acids utilized during protein biosynthesis as well as others such as 4-hydroxyproline, hydroxylysine, desmosine, isodesmosine, homocysteine, citrulline and ornithine, for example. Non-naturally occurring amino acids include, for example, (D)-amino acids, norleucine, norvaline, p-fluorophenylalanine, ethionine and the like, which are known to a person skilled in the art. Amino acid analogs include modified forms of naturally and non-naturally occurring amino acids. Such modifications can include, for example, substitution or replacement of chemical groups and moieties on the amino acid or by derivatization of the amino acid. Amino acid mimetics include, for example, organic structures which exhibit functionally similar properties such as charge and charge spacing characteristic of the reference amino acid. For example, an organic structure which mimics arginine (Arg or R) would have a positive charge moiety located in similar molecular space and having the same degree of mobility as the e-amino group of the side chain of the naturally occurring Arg amino acid. Mimetics also include constrained structures so as to maintain optimal spacing and charge interactions of the amino acid or of the amino acid functional groups. Those skilled in the art know or can determine what structures constitute functionally equivalent amino acid analogs and amino acid mimetics.

[0332] As used herein, the term “antibody” encompasses not only intact polyclonal or monoclonal antibodies, but also fragments thereof (such as dAb, Fab, Fab′, F(ab′)2, Fv), single chain (ScFv), synthetic variants thereof, naturally occurring variants, fusion proteins comprising an antibody portion with an antigen-binding fragment of the required specificity, humanized antibodies, chimeric antibodies, and any other modified configuration of the immunoglobulin molecule that comprises an antigen-binding site or fragment (epitope recognition site) of the required specificity. Certain features and characteristics of antibodies (and antigen-binding fragments thereof) are described in greater detail herein.

[0333] An antibody or antigen-binding fragment can be of essentially any type. As is well known in the art, an antibody is an immunoglobulin molecule capable of specific binding to a target through at least one epitope recognition site, located in the variable region of the immunoglobulin molecule.

[0334] The term “antigen-binding fragment” as used herein refers to a polypeptide fragment that contains at least one CDR of an immunoglobulin heavy and/or light chain that binds to the antigen of interest. In this regard, an antigen-binding fragment of the herein described antibodies may comprise 1, 2, 3, 4, 5, or all 6 CDRs of a V_{H} and V_{L} region from antibodies that bind to a target molecule.

[0335] An “epitope” includes that portion of an antigen or other macromolecule capable of forming a binding interaction that interacts with the variable region binding pocket of an antibody, or antigen-binding fragment thereof. Such binding interaction can be manifested as an intermolecular contact with one or more amino acid residues of a CDR. Antigen binding can involve a CDR3 or a CDR3 pair. An epitope can be a linear peptide sequence (i.e., “continuous”) or can be composed of noncontiguous amino acid sequences (i.e., “conformational” or “discontinuous”). An antibody, or antigen-binding fragment thereof, can recognize one or more amino acid sequences; therefore an epitope can define more than one distinct amino acid sequence. Epitopes can be determined, for example, by peptide mapping and sequence analysis techniques well known to one of skill in the art. In particular embodiments, an epitope comprises, consists, or consists essentially of about, at least about, or no more than about 3, 4, 5, 6, 7, 8, 9, 10, 11, 12, 13, 14, 15, 16, 17, 18, 19, or 20 contiguous amino acids (i.e., a linear epitope) or non-contiguous amino acids (i.e., conformational epitope) of a reference sequence or target molecule described herein.

[0336] A “paratope”, also called an antigen-binding site, refers to the part of an immunoglobulin that recognizes and binds to an antigen or antigens. In some instances, a paratope is a small region (e.g., of about 5 to 10 amino acids) within the fragment antigen-binding (Fab) region of an immunoglobulin, and includes a set of six complementarity-determining regions (CDR loops).

[0337] The binding properties of antibodies and antigen-binding fragments thereof can be quantified using methods well known in the art (see Davies et al., Annual Rev. Biochem. 59:439-473, 1990). In some embodiments, an antibody or antigen-binding fragment thereof specifically binds to a target molecule, for example, a cell surface receptor, a cancer or immunomodulatory antigen, or an epitope or complex thereof, with an equilibrium dissociation constant that is about or ranges from about ≤10⁻⁷ M to about 10⁻⁸ M. In some embodiments, the equilibrium dissociation constant is about or ranges from about ≤10⁻⁹ M to about ≤10⁻¹⁰ M. In certain illustrative embodiments, an antibody or antigen-binding fragment thereof has an affinity (Kd or EC₅₀) for a target molecule (to which it specifically binds) of about, at least about, or less than about, 0.01, 0.05, 0.1, 0.2, 0.3, 0.4, 0.5, 0.6, 0.7, 0.8, 0.9, 1, 2, 3, 4, 5, 6, 7, 8, 9, 10, 11, 12, 13, 14, 15, 16, 17, 18, 19, 20, 21, 22, 23, 24, 25, 26, 27, 28, 29, 30, 40, or 50 nM.

[0338] A molecule such as a polypeptide or antibody is said to exhibit “specific binding” or “preferential binding” if it reacts or associates more frequently, more rapidly, with greater duration and/or with greater affinity with a particular cell, substance, or particular epitope than it does with alternative cells or substances, or epitopes. An antibody “specifically binds” or “preferentially binds” to a target molecule or epitope if it binds with greater affinity, avidity, more readily, and/or with greater duration than it binds to other substances or epitopes, for example, by a statistically significant amount. Typically one member of the pair of molecules that exhibit specific binding has an area on its surface, or a cavity, which specifically binds to and is therefore complementary to a particular spatial and/or polar organization of the other member of the pair of molecules. Thus, the members of the pair have the property of binding specifically to each other. For instance, an antibody that specifically or preferentially binds to a specific epitope is an antibody that binds that specific epitope with greater affinity, avidity, more readily, and/or with greater duration than it binds to other epitopes. It is also understood by reading this definition that, for example, an antibody (or moiety or epitope) that specifically or preferentially binds to a first target may or may not specifically or preferentially bind to a second target. The term is also applicable where, for example, an antibody is specific for a particular epitope which is carried by a number of antigens, in which case the specific binding member carrying the antigen-binding fragment or domain will be able to bind to the various antigens carrying the epitope; for example, it may be cross reactive to a number of different forms of a target antigen from multiple species that share a common epitope

[0339] Immunological binding generally refers to the non-covalent interactions of the type which occur between an immunoglobulin molecule and an antigen for which the immunoglobulin is specific, for example by way of illustration and not limitation, as a result of electrostatic, ionic, hydrophilic and/or hydrophobic attractions or repulsion, steric forces, hydrogen bonding, van der Waals forces, and other interactions. The strength, or affinity of immunological binding interactions can be expressed in terms of the dissociation constant (Kd) of the interaction, wherein a smaller Kd represents a greater affinity. Immunological binding properties of selected polypeptides can be quantified using methods well known in the art. One such method entails measuring the rates of antigen-binding site/antigen complex formation and dissociation, wherein those rates depend on the concentrations of the complex partners, the affinity of the interaction, and on geometric parameters that equally influence the rate in both directions. Thus, both the “on rate constant” (Kon) and the “off rate constant” (Koff) can be determined by calculation of the concentrations and the actual rates of association and dissociation. The ratio of Koff/Kon enables cancellation of all parameters not related to affinity, and is thus equal to the dissociation constant Kd. As used herein, the term “affinity” includes the equilibrium constant for the reversible binding of two agents and is expressed as Kd or EC₅₀. Affinity of a binding protein to a ligand such as affinity of an antibody for an epitope can be, for example, from about 100 nanomolar (nM) to about 0.1 nM, from about 100 nM to about 1 picomolar (pM), or from about 100 nM to about 1 femtomolar (fM). As used herein, the term “avidity” refers to the resistance of a complex of two or more agents to dissociation after dilution. In some embodiments, affinity is expressed in the terms of the half maximal effective concentration (EC₅₀), which refers to the concentration of an agent, such as an antibody, as disclosed herein, which induces a response halfway between the baseline and maximum after a specified exposure time. The EC₅₀ is commonly used as a measure of an antibody's potency.

[0340] Antibodies may be prepared by any of a variety of techniques known to those of ordinary skill in the art. See, e.g., Harlow and Lane, Antibodies: A Laboratory Manual, Cold Spring Harbor Laboratory, 1988. Monoclonal antibodies specific for a polypeptide of interest may be prepared, for example, using the technique of Kohler and Milstein, Eur. J. Immunol. 6:511-519, 1976, and improvements thereto. Also included are methods that utilize transgenic animals such as mice to express human antibodies. See, e.g., Neuberger et al., Nature Biotechnology 14:826, 1996; Lonberg et al., Handbook of Experimental Pharmacology 113:49-101, 1994; and Lonberg et al., Internal Review of Immunology 13:65-93, 1995. Particular examples include the VELOCIMMUNE® platform by REGENEREX® (see, e.g., U.S. Pat. No. 6,596,541).

[0341] Antibodies can also be generated or identified by the use of phage display or yeast display libraries (see, e.g., U.S. Pat. No. 7,244,592; Chao et al., Nature Protocols. 1:755-768, 2006). Non-limiting examples of available libraries include cloned or synthetic libraries, such as the Human Combinatorial Antibody Library (HuCAL), in which the structural diversity of the human antibody repertoire is represented by seven heavy chain and seven light chain variable region genes. The combination of these genes gives rise to 49 frameworks in the master library. By superimposing highly variable genetic cassettes (CDRs=complementarity determining regions) on these frameworks, the vast human antibody repertoire can be reproduced. Also included are human libraries designed with human-donor-sourced fragments encoding a light-chain variable region, a heavy-chain CDR-3, synthetic DNA encoding diversity in heavy-chain CDR-1, and synthetic DNA encoding diversity in heavy-chain CDR-2. Other libraries suitable for use will be apparent to persons skilled in the art.

[0342] In certain embodiments, antibodies and antigen-binding fragments thereof as described herein include a heavy chain and a light chain CDR set, respectively interposed between a heavy chain and a light chain framework region (FR) set which provide support to the CDRs and define the spatial relationship of the CDRs relative to each other. As used herein, the term “CDR set” refers to the three hypervariable regions of a heavy or light chain V region. Proceeding from the N-terminus of a heavy or light chain, these regions are denoted as “CDR1,” “CDR2,” and “CDR3” respectively. An antigen-binding site, therefore, includes six CDRs, comprising the CDR set from each of a heavy and a light chain V region. A polypeptide comprising a single CDR, (e.g., a CDR1, CDR2 or CDR3) is referred to herein as a “molecular recognition unit.” Crystallographic analysis of a number of antigen-antibody complexes has demonstrated that the amino acid residues of CDRs form extensive contact with bound antigen, wherein the most extensive antigen contact is with the heavy chain CDR3. Thus, the molecular recognition units are primarily responsible for the specificity of an antigen-binding site.

[0343] As used herein, the term “FR set” refers to the four flanking amino acid sequences which frame the CDRs of a CDR set of a heavy or light chain V region. Some FR residues may contact bound antigen; however, FRs are primarily responsible for folding the V region into the antigen-binding site, particularly the FR residues directly adjacent to the CDRs. Within FRs, certain amino residues and certain structural features are very highly conserved. In this regard, all V region sequences contain an internal disulfide loop of around 90 amino acid residues. When the V regions fold into a binding-site, the CDRs are displayed as projecting loop motifs which form an antigen-binding surface. It is generally recognized that there are conserved structural regions of FRs which influence the folded shape of the CDR loops into certain “canonical” structures—regardless of the precise CDR amino acid sequence. Further, certain FR residues are known to participate in non-covalent interdomain contacts which stabilize the interaction of the antibody heavy and light chains.

[0344] The structures and locations of immunoglobulin variable domains may be determined by reference to Kabat, E. A. et al., Sequences of Proteins of Immunological Interest. 4th Edition. US Department of Health and Human Services. 1987, and updates thereof.

[0345] Also include are “monoclonal” antibodies, which refer to a homogeneous antibody population wherein the monoclonal antibody is comprised of amino acids (naturally occurring and non-naturally occurring) that are involved in the selective binding of an epitope. Monoclonal antibodies are highly specific, being directed against a single epitope. The term “monoclonal antibody” encompasses not only intact monoclonal antibodies and full-length monoclonal antibodies, but also fragments thereof (such as Fab, Fab′, F(ab′)2, Fv), single chain (ScFv), variants thereof, fusion proteins comprising an antigen-binding portion, humanized monoclonal antibodies, chimeric monoclonal antibodies, and any other modified configuration of the immunoglobulin molecule that comprises an antigen-binding fragment (epitope recognition site) of the required specificity and the ability to bind to an epitope. It is not intended to be limited as regards the source of the antibody or the manner in which it is made (e.g., by hybridoma, phage selection, recombinant expression, transgenic animals). The term includes whole immunoglobulins as well as the fragments etc. described above under the definition of “antibody.”

[0346] The proteolytic enzyme papain preferentially cleaves IgG molecules to yield several fragments, two of which (the F(ab) fragments) each comprise a covalent heterodimer that includes an intact antigen-binding site. The enzyme pepsin is able to cleave IgG molecules to provide several fragments, including the F(ab′)2 fragment which comprises both antigen-binding sites. An Fv fragment for use according to certain embodiments can be produced by preferential proteolytic cleavage of an IgM, and on rare occasions of an IgG or IgA immunoglobulin molecule. Fv fragments are, however, more commonly derived using recombinant techniques known in the art. The Fv fragment includes a non-covalent VH::VL heterodimer including an antigen-binding site which retains much of the antigen recognition and binding capabilities of the native antibody molecule. See Inbar et al., PNAS USA. 69:2659-2662, 1972; Hochman et al., Biochem. 15:2706-2710, 1976; and Ehrlich et al., Biochem. 19:4091-4096, 1980.

[0347] In certain embodiments, single chain Fv (scFV) antibodies are contemplated. For example, Kappa bodies (Ill et al., Prot. Eng. 10:949-57, 1997); minibodies (Martin et al., EMBO J 13:5305-9, 1994); diabodies (Holliger et al., PNAS 90: 6444-8, 1993); or Janusins (Traunecker et al., EMBO J 10: 3655-59, 1991; and Traunecker et al., Int. J. Cancer Suppl. 7:51-52, 1992), may be prepared using standard molecular biology techniques following the teachings of the present application with regard to selecting antibodies having the desired specificity.

[0348] A single chain Fv (scFv) polypeptide is a covalently linked VH::VL heterodimer which is expressed from a gene fusion including VH- and VL-encoding genes linked by a peptide-encoding linker. Huston et al. (PNAS USA. 85(16):5879-5883, 1988). A number of methods have been described to discern chemical structures for converting the naturally aggregated—but chemically separated—light and heavy polypeptide chains from an antibody V region into an scFv molecule which will fold into a three dimensional structure substantially similar to the structure of an antigen-binding site. See, e.g., U.S. Pat. Nos. 5,091,513 and 5,132,405, to Huston et al.; and U.S. Pat. No. 4,946,778, to Ladner et al.

[0349] Certain embodiments include “probodies”, or antibodies where the binding site(s) are masked or otherwise inert until activated by proteolytic cleavage in target or disease tissue. Certain of these and related embodiments comprise one or more masking moieties that sterically hinder the antigen-binding site(s) of the antibody, and which are fused to the antibody via one or more proteolytically-cleavable linkers (see, for example, Polu and Lowman, Expert Opin. Biol. Ther. 14:1049-1053, 2014).

[0350] In certain embodiments, an antibody as described herein is in the form of a diabody. Diabodies are multimers of polypeptides, each polypeptide comprising a first domain comprising a binding region of an immunoglobulin light chain and a second domain comprising a binding region of an immunoglobulin heavy chain, the two domains being linked (e.g., by a peptide linker) but unable to associate with each other to form an antigen-binding site: antigen-binding sites are formed by the association of the first domain of one polypeptide within the multimer with the second domain of another polypeptide within the multimer (WO94/13804).

[0351] A dAb fragment of an antibody consists of a VH domain (Ward, E. S. et al., Nature 341, 544-546 (1989)).

[0352] Where bispecific or multi-specific antibodies are to be used, these may be conventional bispecific antibodies, which can be manufactured in a variety of ways (Holliger and Winter, Current Opinion Biotechnol. 4:446-449, 1993), e.g., prepared chemically or from hybrid hybridomas, or may be any of the bispecific antibody fragments mentioned above. Diabodies and scFv can be constructed without an Fc region, using only variable domains, potentially reducing the effects of anti-idiotypic reaction. Bispecific whole antibodies may be made by knobs-into-holes engineering (J. B. B. Ridgeway et al., Protein Eng., 9, 616-621, 1996).

[0353] Bispecific diabodies, as opposed to bispecific whole antibodies, may also be particularly useful because they can be readily constructed and expressed in E. coli. Diabodies (and many other polypeptides such as antibody fragments) of appropriate binding specificities can be readily selected using phage display (WO94/13804) from libraries. If one arm of the diabody is to be kept constant, for instance, with a specificity directed against antigen X, then a library can be made where the other arm is varied and an antibody of appropriate specificity selected.

[0354] In certain embodiments, the antibodies described herein may be provided in the form of a UniBody®. A UniBody® is an IgG4 antibody with the hinge region removed (see GenMab Utrecht, The Netherlands; see also, e.g., US20090226421). This proprietary antibody technology creates a stable, smaller antibody format with an anticipated longer therapeutic window than current small antibody formats. IgG4 antibodies are considered inert and thus do not interact with the immune system. Fully human IgG4 antibodies may be modified by eliminating the hinge region of the antibody to obtain half-molecule fragments having distinct stability properties relative to the corresponding intact IgG4 (GenMab, Utrecht). Halving the IgG4 molecule leaves only one area on the UniBody® that can bind to cognate antigens (e.g., disease targets) and the UniBody® therefore binds univalently to only one site on target cells. For certain cancer cell surface antigens, this univalent binding may not stimulate the cancer cells to grow as may be seen using bivalent antibodies having the same antigen specificity, and hence UniBody® technology may afford treatment options for some types of cancer that may be refractory to treatment with conventional antibodies. The small size of the UniBody® can be a great benefit when treating some forms of cancer, allowing for better distribution of the molecule over larger solid tumors and potentially increasing efficacy.

[0355] In certain embodiments, the antibodies of the present disclosure may take the form of a Nanobody®. Nanobodies® are encoded by single genes and are efficiently produced in almost all prokaryotic and eukaryotic hosts e.g. E. coli (see e.g. U.S. Pat. No. 6,765,087), molds (for example Aspergillus or Trichoderma) and yeast (for example Saccharomyces, Kluyvermyces, Hansenula or Pichia (see e.g. U.S. Pat. No. 6,838,254). The production process is scalable and multi-kilogram quantities of Nanobodies® have been produced. Nanobodies may be formulated as a ready-to-use solution having a long shelf life. The Nanoclone® method (see, e.g., WO 06/079372) is a proprietary method for generating Nanobodies against a desired target, based on automated high-throughput selection of B-cells.

[0356] In certain embodiments, the antibodies or antigen-binding fragments thereof are humanized. These embodiments refer to a chimeric molecule, generally prepared using recombinant techniques, having an antigen-binding site derived from an immunoglobulin from a non-human species and the remaining immunoglobulin structure of the molecule based upon the structure and/or sequence of a human immunoglobulin. The antigen-binding site may comprise either complete variable domains fused onto constant domains or only the CDRs grafted onto appropriate framework regions in the variable domains. Epitope binding sites may be wild type or modified by one or more amino acid substitutions. This eliminates the constant region as an immunogen in human individuals, but the possibility of an immune response to the foreign variable region remains (LoBuglio et al., PNAS USA 86:4220-4224, 1989; Queen et al., PNAS USA. 86:10029-10033, 1988; Riechmann et al., Nature. 332:323-327, 1988). Illustrative methods for humanization of antibodies include the methods described in U.S. Pat. No. 7,462,697.

[0357] Another approach focuses not only on providing human-derived constant regions, but modifying the variable regions as well so as to reshape them as closely as possible to human form. It is known that the variable regions of both heavy and light chains contain three complementarity-determining regions (CDRs) which vary in response to the epitopes in question and determine binding capability, flanked by four framework regions (FRs) which are relatively conserved in a given species and which putatively provide a scaffolding for the CDRs. When nonhuman antibodies are prepared with respect to a particular epitope, the variable regions can be “reshaped” or “humanized” by grafting CDRs derived from nonhuman antibody on the FRs present in the human antibody to be modified. Application of this approach to various antibodies has been reported by Sato et al., Cancer Res. 53:851-856, 1993; Riechmann et al., Nature 332:323-327, 1988; Verhoeyen et al., Science 239:1534-1536, 1988; Kettleborough et al., Protein Engineering. 4:773-3783, 1991; Maeda et al., Human Antibodies Hybridoma 2:124-134, 1991; Gorman et al., PNAS USA. 88:4181-4185, 1991; Tempest et al., Bio/Technology 9:266-271, 1991; Co et al., PNAS USA. 88:2869-2873, 1991; Carter et al., PNAS USA. 89:4285-4289, 1992; and Co et al., J Immunol. 148:1149-1154, 1992. In some embodiments, humanized antibodies preserve all CDR sequences (for example, a humanized mouse antibody which contains all six CDRs from the mouse antibodies). In other embodiments, humanized antibodies have one or more CDRs (one, two, three, four, five, six) which are altered with respect to the original antibody, which are also termed one or more CDRs “derived from” one or more CDRs from the original antibody.

[0358] In certain embodiments, the antibodies are “chimeric” antibodies. In this regard, a chimeric antibody is comprised of an antigen-binding fragment of an antibody operably linked or otherwise fused to a heterologous Fc portion of a different antibody. In certain embodiments, the Fc domain or heterologous Fc domain is of human origin. In certain embodiments, the Fc domain or heterologous Fc domain is of mouse origin. In other embodiments, the heterologous Fc domain may be from a different Ig class from the parent antibody, including IgA (including subclasses IgA1 and IgA2), IgD, IgE, IgG (including subclasses IgG1, IgG2, IgG3, and IgG4), and IgM. In further embodiments, the heterologous Fc domain may be comprised of CH2 and CH3 domains from one or more of the different Ig classes. As noted above with regard to humanized antibodies, the antigen-binding fragment of a chimeric antibody may comprise only one or more of the CDRs of the antibodies described herein (e.g., 1, 2, 3, 4, 5, or 6 CDRs of the antibodies described herein), or may comprise an entire variable domain (VL, VH or both).

[0359] As used herein, a subject “at risk” of developing a disease, or adverse reaction may or may not have detectable disease, or symptoms of disease, and may or may not have displayed detectable disease or symptoms of disease prior to the treatment methods described herein. “At risk” denotes that a subject has one or more risk factors, which are measurable parameters that correlate with development of a disease, as described herein and known in the art. A subject having one or more of these risk factors has a higher probability of developing disease, or an adverse reaction than a subject without one or more of these risk factor(s).

[0360] “Biocompatible” refers to materials or compounds which are generally not injurious to biological functions of a cell or subject and which will not result in any degree of unacceptable toxicity, including allergenic and disease states.

[0361] The term “binding” refers to a direct association between two molecules, due to, for example, covalent, electrostatic, hydrophobic, and ionic and/or hydrogen-bond interactions, including interactions such as salt bridges and water bridges.

[0362] By “coding sequence” is meant any nucleic acid sequence that contributes to the code for the polypeptide product of a gene. By contrast, the term “non-coding sequence” refers to any nucleic acid sequence that does not directly contribute to the code for the polypeptide product of a gene.

[0363] Throughout this disclosure, unless the context requires otherwise, the words “comprise,” “comprises,” and “comprising” will be understood to imply the inclusion of a stated step or element or group of steps or elements but not the exclusion of any other step or element or group of steps or elements.

[0364] By “consisting of” is meant including, and limited to, whatever follows the phrase “consisting of.” Thus, the phrase “consisting of” indicates that the listed elements are required or mandatory, and that no other elements may be present. By “consisting essentially of” is meant including any elements listed after the phrase, and limited to other elements that do not interfere with or contribute to the activity or action specified in the disclosure for the listed elements. Thus, the phrase “consisting essentially of” indicates that the listed elements are required or mandatory, but that other elements are optional and may or may not be present depending upon whether or not they materially affect the activity or action of the listed elements.

[0365] The term “endotoxin free” or “substantially endotoxin free” relates generally to compositions, solvents, and/or vessels that contain at most trace amounts (e.g., amounts having no clinically adverse physiological effects to a subject) of endotoxin, and preferably undetectable amounts of endotoxin. Endotoxins are toxins associated with certain micro-organisms, such as bacteria, typically gram-negative bacteria, although endotoxins may be found in gram-positive bacteria, such as Listeria monocytogenes. The most prevalent endotoxins are lipopolysaccharides (LPS) or lipo-oligo-saccharides (LOS) found in the outer membrane of various Gram-negative bacteria, and which represent a central pathogenic feature in the ability of these bacteria to cause disease. Small amounts of endotoxin in humans may produce fever, a lowering of the blood pressure, and activation of inflammation and coagulation, among other adverse physiological effects.

[0366] Therefore, in pharmaceutical production, it is often desirable to remove most or all traces of endotoxin from drug products and/or drug containers, because even small amounts may cause adverse effects in humans. A depyrogenation oven may be used for this purpose, as temperatures in excess of 300° C. are typically required to break down most endotoxins. For instance, based on primary packaging material such as syringes or vials, the combination of a glass temperature of 250° C. and a holding time of 30 minutes is often sufficient to achieve a 3 log reduction in endotoxin levels. Other methods of removing endotoxins are contemplated, including, for example, chromatography and filtration methods, as described herein and known in the art.

[0367] Endotoxins can be detected using routine techniques known in the art. For example, the Limulus Amoebocyte Lysate assay, which utilizes blood from the horseshoe crab, is a very sensitive assay for detecting presence of endotoxin. In this test, very low levels of LPS can cause detectable coagulation of the limulus lysate due a powerful enzymatic cascade that amplifies this reaction. Endotoxins can also be quantitated by enzyme-linked immunosorbent assay (ELISA). To be substantially endotoxin free, endotoxin levels may be less than about 0.001, 0.005, 0.01, 0.02, 0.03, 0.04, 0.05, 0.06, 0.08, 0.09, 0.1, 0.5, 1.0, 1.5, 2, 2.5, 3, 4, 5, 6, 7, 8, 9, or 10 EU/mg of active compound. Typically, 1 ng lipopolysaccharide (LPS) corresponds to about 1-10 EU.

[0368] The term “half maximal effective concentration” or “EC₅₀” refers to the concentration of an agent (e.g., fusion protein) as described herein at which it induces a response halfway between the baseline and maximum after some specified exposure time; the EC₅₀ of a graded dose response curve therefore represents the concentration of a compound at which 50% of its maximal effect is observed. EC50 also represents the plasma concentration required for obtaining 50% of a maximum effect in vivo. Similarly, the “EC₉₀” refers to the concentration of an agent or composition at which 90% of its maximal effect is observed. The “EC₉₀” can be calculated from the “EC50” and the Hill slope, or it can be determined from the data directly, using routine knowledge in the art. In some embodiments, the EC₅₀ of an agent (e.g., fusion protein, antibody) is less than about 0.01, 0.05, 0.1, 0.2, 0.3, 0.4, 0.5, 0.6, 0.7, 0.8, 0.9, 1, 2, 3, 4, 5, 6, 7, 8, 9, 10, 11, 12, 13, 14, 15, 16, 17, 18, 19, 20, 25, 30, 40, 50, 60, 70, 80, 90, 100, 200 or 500 nM. In some embodiments, an agent will have an EC₅0 value of about 1 nM or less.

[0369] “Immune response” means any immunological response originating from immune system, including responses from the cellular and humeral, innate and adaptive immune systems. Exemplary cellular immune cells include for example, lymphocytes, macrophages, T cells, B cells, NK cells, neutrophils, eosinophils, dendritic cells, mast cells, monocytes, and all subsets thereof. Cellular responses include for example, effector function, cytokine release, phagocytosis, efferocytosis, translocation, trafficking, proliferation, differentiation, activation, repression, cell-cell interactions, apoptosis, etc. Humeral responses include for example IgG, IgM, IgA, IgE, responses and their corresponding effector functions.

[0370] The “half-life” of an agent such as a fusion protein can refer to the time it takes for the agent to lose half of its pharmacologic, physiologic, or other activity, relative to such activity at the time of administration into the serum or tissue of an organism, or relative to any other defined time-point. “Half-life” can also refer to the time it takes for the amount or concentration of an agent to be reduced by half of a starting amount administered into the serum or tissue of an organism, relative to such amount or concentration at the time of administration into the serum or tissue of an organism, or relative to any other defined time-point. The half-life can be measured in serum and/or any one or more selected tissues.

[0371] The terms “modulating” and “altering” include “increasing,” “enhancing” or “stimulating,” as well as “decreasing” or “reducing,” typically in a statistically significant or a physiologically significant amount or degree relative to a control. An “increased,” “stimulated” or “enhanced” amount is typically a “statistically significant” amount, and may include an increase that is 1.1, 1.2, 1.5, 2, 3, 4, 5, 6, 7, 8, 9, 10, 15, 20, 30, 40, 50, 60, 70, 80, 90, 100 or more times (e.g., 500, 1000 times) (including all integers and ranges in between e.g., 1.5, 1.6, 1.7, 1.8, etc.) the amount produced by no composition (e.g., the absence of agent) or a control composition. A “decreased” or “reduced” amount is typically a “statistically significant” amount, and may include a 1%, 2%, 3%, 4%, 5%, 6%, 7%, 8%, 9%, 10%, 11%, 12%, 13%, 14%, 15%, 16%, 17%, 18%, 19%, 20%, 25%, 30%, 35%, 40%, 45%, 50%, 55%, 60%, 65%, 70%, 75%, 80%, 85%, 90%, 95%, or 100% decrease (including all integers and ranges in between) in the amount produced by no composition (e.g., the absence of an agent) or a control composition. Examples of comparisons and “statistically significant” amounts are described herein.

[0372] The terms “polypeptide,” “protein” and “peptide” are used interchangeably and mean a polymer of amino acids not limited to any particular length. The term “enzyme” includes polypeptide or protein catalysts. The terms include modifications such as myristoylation, sulfation, glycosylation, phosphorylation and addition or deletion of signal sequences. The terms “polypeptide” or “protein” means one or more chains of amino acids, wherein each chain comprises amino acids covalently linked by peptide bonds, and wherein said polypeptide or protein can comprise a plurality of chains non-covalently and/or covalently linked together by peptide bonds, having the sequence of native proteins, that is, proteins produced by naturally-occurring and specifically non-recombinant cells, or genetically-engineered or recombinant cells, and comprise molecules having the amino acid sequence of the native protein, or molecules having deletions from, additions to, and/or substitutions of one or more amino acids of the native sequence. In certain embodiments, the polypeptide is a “recombinant” polypeptide, produced by recombinant cell that comprises one or more recombinant DNA molecules, which are typically made of heterologous polynucleotide sequences or combinations of polynucleotide sequences that would not otherwise be found in the cell.

[0373] The term “polynucleotide” and “nucleic acid” includes mRNA, RNA, cRNA, cDNA, and DNA. The term typically refers to polymeric form of nucleotides of at least 10 bases in length, either ribonucleotides or deoxynucleotides or a modified form of either type of nucleotide. The term includes single and double stranded forms of DNA. The terms “isolated DNA” and “isolated polynucleotide” and “isolated nucleic acid” refer to a molecule that has been isolated free of total genomic DNA of a particular species. Therefore, an isolated DNA segment encoding a polypeptide refers to a DNA segment that contains one or more coding sequences yet is substantially isolated away from, or purified free from, total genomic DNA of the species from which the DNA segment is obtained. Also included are non-coding polynucleotides (e.g., primers, probes, oligonucleotides), which do not encode a polypeptide. Also included are recombinant vectors, including, for example, expression vectors, viral vectors, plasmids, cosmids, phagemids, phage, viruses, and the like.

[0374] Additional coding or non-coding sequences may, but need not, be present within a polynucleotide described herein, and a polynucleotide may, but need not, be linked to other molecules and/or support materials. Hence, a polynucleotide or expressible polynucleotides, regardless of the length of the coding sequence itself, may be combined with other sequences, for example, expression control sequences.

[0375] The term “isolated” polypeptide or protein referred to herein means that a subject protein (1) is free of at least some other proteins with which it would typically be found in nature, (2) is essentially free of other proteins from the same source, e.g., from the same species, (3) is expressed by a cell from a different species, (4) has been separated from at least about 50 percent of polynucleotides, lipids, carbohydrates, or other materials with which it is associated in nature, (5) is not associated (by covalent or non-covalent interaction) with portions of a protein with which the “isolated protein” is associated in nature, (6) is operably associated (by covalent or non-covalent interaction) with a polypeptide with which it is not associated in nature, or (7) does not occur in nature. Such an isolated protein can be encoded by genomic DNA, cDNA, mRNA or other RNA, of may be of synthetic origin, or any combination thereof. In certain embodiments, the isolated protein is substantially free from proteins or polypeptides or other contaminants that are found in its natural environment that would interfere with its use (therapeutic, diagnostic, prophylactic, research or otherwise).

[0376] In certain embodiments, the “purity” of any given agent (e.g., fusion protein, antibody) in a composition may be defined. For instance, certain compositions may comprise an agent such as a polypeptide agent that is at least 80%, 85%, 90%, 91%, 92%, 93%, 94%, 95%, 96%, 97%, 98%, 99%, or 100% pure on a protein basis or a weight-weight basis, including all decimals and ranges in between, as measured, for example and by no means limiting, by high performance liquid chromatography (HPLC), a well-known form of column chromatography used frequently in biochemistry and analytical chemistry to separate, identify, and quantify compounds.

[0377] The term “reference sequence” refers generally to a nucleic acid coding sequence, or amino acid sequence, to which another sequence is being compared. All polypeptide and polynucleotide sequences described herein are included as references sequences, including those described by name and those described in the Tables and the Sequence Listing.

[0378] Certain embodiments include biologically active “variants” and “fragments” of the proteins/polypeptides described herein, and the polynucleotides that encode the same. “Variants” contain one or more substitutions, additions, deletions, and/or insertions relative to a reference polypeptide or polynucleotide (see, e.g., the Tables and the Sequence Listing). A variant polypeptide or polynucleotide comprises an amino acid or nucleotide sequence with at least about 50%, 55%, 60%, 65%, 70%, 75%, 80%, 85%, 90%, 91%, 92%, 93%, 94%, 95%, 96%, 97%, 98%, 99% or more sequence identity or similarity or homology to a reference sequence, as described herein, and substantially retains the activity of that reference sequence. Also included are sequences that consist of or differ from a reference sequences by the addition, deletion, insertion, or substitution of 1, 2, 3, 4, 5, 6, 7, 8, 9, 10, 11, 12, 13, 14, 15, 16, 17, 18, 19, 20, 30, 40, 50, 60, 70, 80, 90, 100, 110, 120, 130, 140, 150 or more amino acids or nucleotides and which substantially retain at least one activity of that reference sequence. In certain embodiments, the additions or deletions include C-terminal and/or N-terminal additions and/or deletions.

[0379] The terms “sequence identity” or, for example, comprising a “sequence 50% identical to,” as used herein, refer to the extent that sequences are identical on a nucleotide-by-nucleotide basis or an amino acid-by-amino acid basis over a window of comparison. Thus, a “percentage of sequence identity” may be calculated by comparing two optimally aligned sequences over the window of comparison, determining the number of positions at which the identical nucleic acid base (e.g., A, T, C, G, I) or the identical amino acid residue (e.g., Ala, Pro, Ser, Thr, Gly, Val, Leu, Ile, Phe, Tyr, Trp, Lys, Arg, His, Asp, Glu, Asn, Gln, Cys and Met) occurs in both sequences to yield the number of matched positions, dividing the number of matched positions by the total number of positions in the window of comparison (i.e., the window size), and multiplying the result by 100 to yield the percentage of sequence identity. Optimal alignment of sequences for aligning a comparison window may be conducted by computerized implementations of algorithms (GAP, BESTFIT, FASTA, and TFASTA in the Wisconsin Genetics Software Package Release 7.0, Genetics Computer Group, 575 Science Drive Madison, Wis., USA) or by inspection and the best alignment (i.e., resulting in the highest percentage homology over the comparison window) generated by any of the various methods selected. Reference also may be made to the BLAST family of programs as for example disclosed by Altschul et al., Nucl. Acids Res. 25:3389, 1997.

[0380] The term “solubility” refers to the property of an agent (e.g., fusion protein, antibody) provided herein to dissolve in a liquid solvent and form a homogeneous solution. Solubility is typically expressed as a concentration, either by mass of solute per unit volume of solvent (g of solute per kg of solvent, g per dL (100 mL), mg/ml, etc.), molarity, molality, mole fraction or other similar descriptions of concentration. The maximum equilibrium amount of solute that can dissolve per amount of solvent is the solubility of that solute in that solvent under the specified conditions, including temperature, pressure, pH, and the nature of the solvent. In certain embodiments, solubility is measured at physiological pH, or other pH, for example, at pH 5.0, pH 6.0, pH 7.0, pH 7.4, pH 7.6, pH 7.8, or pH 8.0 (e.g., about pH 5-8). In certain embodiments, solubility is measured in water or a physiological buffer such as PBS or NaCl (with or without NaPO₄). In specific embodiments, solubility is measured at relatively lower pH (e.g., pH 6.0) and relatively higher salt (e.g., 500 mM NaCl and 10 mM NaPO₄). In certain embodiments, solubility is measured in a biological fluid (solvent) such as blood or serum. In certain embodiments, the temperature can be about room temperature (e.g., about 20, 21, 22, 23, 24, 25° C.) or about body temperature (37° C.). In certain embodiments, an agent has a solubility of at least about 0.1, 0.2, 0.3, 0.4, 0.5, 0.6, 0.7, 0.8, 0.9, 1, 2, 3, 4, 5, 6, 7, 8, 9, 10, 11, 12, 13, 14, 15, 16, 17, 18, 19, 20, 25, 30, 40, 50, 60, 70, 80, 90 or 100 mg/ml at room temperature or at 37° C.

[0381] A “subject” or a “subject in need thereof” or a “patient” or a “patient in need thereof” includes a mammalian subject such as a human subject.

[0382] “Substantially” or “essentially” means nearly totally or completely, for instance, 95%, 96%, 97%, 98%, 99% or greater of some given quantity.

[0383] By “statistically significant,” it is meant that the result was unlikely to have occurred by chance. Statistical significance can be determined by any method known in the art. Commonly used measures of significance include the p-value, which is the frequency or probability with which the observed event would occur, if the null hypothesis were true. If the obtained p-value is smaller than the significance level, then the null hypothesis is rejected. In simple cases, the significance level is defined at a p-value of 0.05 or less.

[0384] “Therapeutic response” refers to improvement of symptoms (whether or not sustained) based on administration of one or more therapeutic agents.

[0385] As used herein, the terms “therapeutically effective amount”, “therapeutic dose,” “prophylactically effective amount,” or “diagnostically effective amount” is the amount of an agent (e.g., fusion protein, antibody) needed to elicit the desired biological response following administration.

[0386] As used herein, “treatment” of a subject (e.g., a mammal, such as a human) or a cell is any type of intervention used in an attempt to alter the natural course of the individual or cell. Treatment includes, but is not limited to, administration of a pharmaceutical composition, and may be performed either prophylactically or subsequent to the initiation of a pathologic event or contact with an etiologic agent. Also included are “prophylactic” treatments, which can be directed to reducing the rate of progression of the disease or condition being treated, delaying the onset of that disease or condition, or reducing the severity of its onset. “Treatment” or “prophylaxis” does not necessarily indicate complete eradication, cure, or prevention of the disease or condition, or associated symptoms thereof.

[0387] The term “wild-type” refers to a gene or gene product (e.g., a polypeptide) that is most frequently observed in a population and is thus arbitrarily designed the “normal” or “wild-type” form of the gene.

[0388] Each embodiment in this specification is to be applied to every other embodiment unless expressly stated otherwise.

[0389] Anti-Denatured Collagen Antibodies

[0390] Certain embodiments include an isolated antibody, or antigen-binding fragment thereof, which specifically binds to a denatured human collagen type I, II, III, IV, and/or V polypeptide at a cryptic collagen epitope. In some embodiments, the antibody, or antigen-binding fragment thereof, selectively binds to “denatured” human collagen relative to “native” human collagen. In some embodiments, the antibody, or antigen-binding fragment thereof, specifically binds to both “denatured” and “native” forms of human collagen.

[0391] “Native” collagen refers to a collagen molecule in which the three alpha-chains are organized in a triple helical molecule. Native collagen can be of different stages of post-translational processing such as pro collagen and any intermediates in the generation of a mature tissue form of collagen, or collagen molecules isolated by limited proteolysis of tissues under conditions where the triple-helical structure of collagen is not disrupted. Thus, native collagen can be an intact collagen molecule or can contain non-triple-helical sequences flanking triple-helical regions, so long as the triple-helical is not disrupted. “Denatured” collagen refers to a collagen molecule in which the triple helix is completely or partially disrupted such that a cryptic epitope is made accessible. Denaturation of collagen can occur in situ (for example, in a tumor/cancer tissue) by the action of proteinases, for example, matrix metalloproteinases, which cleave collagen within triple helical regions, rendering the resulting fragments of the triple helix unstable. Denaturation of collagen can be induced in vitro by the deal or chemical denaturation of native collagen. Denatured collagen can also be prepared in vitro by treatment of native collagen with proteinases capable of cleaving a triple helical region(s), which are commonly referred to as collagenolytic enzymes, at temperatures where the resulting fragments of the triple helix are thermally unstable. Denatured collagen can be obtained by denaturation of native collagens of different stages of post-translational processing or denaturation of native collagen isolated from tissues by limited proteolysis.

[0392] Exemplary human collagen polypeptide sequences are provided in Table C1 below.

TABLE C1
Human Collagen Polypeptides

| | | SEQ ID |
|---|---|---|
| Name | Sequence | NO : |
| Type I, | MFSFVDLRLLLLLAATALLTHGQEEGQVEGQDEDIPPITCVQNGLRYHDRDVWK | 415 |
| alpha 1 | PEPCRICVCDNGKVLCDDVICDETKNCPGAEVPEGECCPVCPDGSESPTDQETT | |
| chain | GVEGPKGDTGPRGPRGPAGPPGRDGIPGQPGLPGPPGPPGPPGPPGLGGNFAPQ | |
| | LSYGYDEKSTGGISVPGPMGPSGPRGLPGPPGAPGPQGFQGPPGEPGEPGASGP | |
| | MGPRGPPGPPGKNGDDGEAGKPGRPGERGPPGPQGARGLPGTAGLPGMKGHRGF | |
| | SGLDGAKGDAGPAGPKGEPGSPGENGAPGQMGPRGLPGERGRPGAPGPAGARGN | |
| | DGATGAAGPPGPTGPAGPPGFPGAVGAKGEAGPQGPRGSEGPQGVRGEPGPPGP | |
| | AGAAGPAGNPGADGQPGAKGANGAPGIAGAPGFPGARGPSGPQGPGGPPGPKGN | |
| | SGEPGAPGSKGDTGAKGEPGPVGVQGPPGPAGEEGKRGARGEPGPTGLPGPPGE | |
| | RGGPGSRGFPGADGVAGPKGPAGERGSPGPAGPKGSPGEAGRPGEAGLPGAKGL | |
| | TGSPGSPGPDGKTGPPGPAGQDGRPGPPGPPGARGQAGVMGFPGPKGAAGEPGK | |
| | AGERGVPGPPGAVGPAGKDGEAGAQGPPGPAGPAGERGEQGPAGSPGFQGLPGP | |
| | AGPPGEAGKPGEQGVPGDLGAPGPSGARGERGFPGERGVQGPPGPAGPRGANGA | |
| | PGNDGAKGDAGAPGAPGSQGAPGLQGMPGERGAAGLPGPKGDRGDAGPKGADGS | |
| | PGKDGVRGLTGPIGPPGPAGAPGDKGESGPSGPAGPTGARGAPGDRGEPGPPGP | |
| | AGFAGPPGADGQPGAKGEPGDAGAKGDAGPPGPAGPAGPPGPIGNVGAPGAKGA | |
| | RGSAGPPGATGFPGAAGRVGPPGPSGNAGPPGPPGPAGKEGGKGPRGETGPAGR | |
| | PGEVGPPGPPGPAGEKGSPGADGPAGAPGTPGPQGIAGQRGVVGLPGQRGERGF | |
| | PGLPGPSGEPGKQGPSGASGERGPPGPMGPPGLAGPPGESGREGAPGAEGSPGR | |
| | DGSPGAKGDRGETGPAGPPGAPGAPGAPGPVGPAGKSGDRGETGPAGPTGPVGP | |
| | VGARGPAGPQGPRGDKGETGEQGDRGIKGHRGFSGLQGPPGPPGSPGEQGPSGA | |
| | SGPAGPRGPPGSAGAPGKDGLNGLPGPIGPPGPRGRTGDAGPVGPPGPPGPPGP | |
| | PGPPSAGFDFSFLPQPPQEKAHDGGRYYRADDANVVRDRDLEVDTTLKSLSQQI | |
| | ENIRSPEGSRKNPARTCRDLKMCHSDWKSGEYWIDPNQGCNLDAIKVFCNMETG | |
| | ETCVYPTOPSVAQKNWYISKNPKDKRHVWFGESMTDGFQFEYGGQGSDPADVAI | |
| | QLTFLRLMSTEASQNITYHCKNSVAYMDQQTGNLKKALLLQGSNEIEIRAEGNS | |
| | RFTYSVTVDGCTSHTGAWGKTVIEYKTTKTSRLPIIDVAPLDVGAPDQEFGFDV | |
| | GPVCFL | |
| Type I, | MLSFVDTRTLLLLAVTLCLATCQSLQEETVRKGPAGDRGPRGERGPPGPPGRDG | 416 |
| alpha 2 | EDGPTGPPGPPGPPGPPGLGGNFAAQYDGKGVGLGPGPMGLMGPRGPPGAAGAP | |
| chain | GPQGFQGPAGEPGEPGQTGPAGARGPAGPPGKAGEDGHPGKPGRPGERGVVGPQ | |
| | GARGFPGTPGLPGFKGIRGHNGLDGLKGQPGAPGVKGEPGAPGENGTPGQTGAR | |
| | GLPGERGRVGAPGPAGARGSDGSVGPVGPAGPIGSAGPPGFPGAPGPKGEIGAV | |
| | GNAGPAGPAGPRGEVGLPGLSGPVGPPGNPGANGLTGAKGAAGLPGVAGAPGLP | |
| | GPRGIPGPVGAAGATGARGLVGEPGPAGSKGESGNKGEPGSAGPQGPPGPSGEE | |
| | GKRGPNGEAGSAGPPGPPGLRGSPGSRGLPGADGRAGVMGPPGSRGASGPAGVR | |
| | GPNGDAGRPGEPGLMGPRGLPGSPGNIGPAGKEGPVGLPGIDGRPGPIGPAGAR | |
| | GEPGNIGFPGPKGPTGDPGKNGDKGHAGLAGARGAPGPDGNNGAQGPPGPQGVQ | |
| | GGKGEQGPPGPPGFQGLPGPSGPAGEVGKPGERGLHGEFGLPGPAGPRGERGPP | |
| | GESGAAGPTGPIGSRGPSGPPGPDGNKGEPGVVGAVGTAGPSGPSGLPGERGAA | |
| | GIPGGKGEKGEPGLRGEIGNPGRDGARGAPGAVGAPGPAGATGDRGEAGAAGPA | |
| | GPAGPRGSPGERGEVGPAGPNGFAGPAGAAGQPGAKGERGAKGPKGENGVVGPT | |
| | GPVGAAGPAGPNGPPGPAGSRGDGGPPGMTGFPGAAGRTGPPGPSGISGPPGPP | |
| | GPAGKEGLRGPRGDQGPVGRTGEVGAVGPPGFAGEKGPSGEAGTAGPPGTPGPQ | |
| | GLLGAPGILGLPGSRGERGLPGVAGAVGEPGPLGIAGPPGARGPPGAVGSPGVN | |
| | GAPGEAGRDGNPGNDGPPGRDGQPGHKGERGYPGNIGPVGAAGAPGPHGPVGPA | |
| | GKHGNRGETGPSGPVGPAGAVGPRGPSGPQGIRGDKGEPGEKGPRGLPGLKGHN | |
| | GLQGLPGIAGHHGDQGAPGSVGPAGPRGPAGPSGPAGKDGRTGHPGTVGPAGIR | |
| | GPQGHQGPAGPPGPPGPPGPPGVSGGGYDFGYDGDFYRADQPRSAPSLRPKDYE | |
| | VDATLKSLNNQIETLLTPEGSRKNPARTCRDLRLSHPEWSSGYYWIDPNQGCTM | |
| | DAIKVYCDFSTGETCIRAQPENIPAKNWYRSSKDKKHVWLGETINAGSQFEYNV | |
| | EGVTSKEMATOLAFMRLLANYASQNITYHCKNSIAYMDEETGNLKKAVILQGSN | |
| | DVELVAEGNSRFTYTVLVDGCSKKTNEWGKTIIEYKTNKPSRLPFLDIAPLDIG | |
| | GADQEFFVDIGPVCFK | |
| Type II, | MIRLGAPQTLVLLTLLVAAVLRCQGQDVQEAGSCVQDGQRYNDKDVWKPEPCRI | 417 |
| alpha 1 | CVCDTGTVLCDDIICEDVKDCLSPEIPFGECCPICPTDLATASGQPGPKGQKGE | |
| chain | PGDIKDIVGPKGPPGPQGPAGEQGPRGDRGDKGEKGAPGPRGRDGEPGTPGNPG | |
| | PPGPPGPPGPPGLGGNFAAQMAGGFDEKAGGAQLGVMQGPMGPMGPRGPPGPAG | |
| | APGPQGFQGNPGEPGEPGVSGPMGPRGPPGPPGKPGDDGEAGKPGKAGERGPPG | |
| | PQGARGFPGTPGLPGVKGHRGYPGLDGAKGEAGAPGVKGESGSPGENGSPGPMG | |
| | PRGLPGERGRTGPAGAAGARGNDGQPGPAGPPGPVGPAGGPGFPGAPGAKGEAG | |
| | PTGARGPEGAQGPRGEPGTPGSPGPAGASGNPGTDGIPGAKGSAGAPGIAGAPG | |
| | FPGPRGPPGPQGATGPLGPKGQTGEPGIAGFKGEQGPKGEPGPAGPQGAPGPAG | |
| | EEGKRGARGEPGGVGPIGPPGERGAPGNRGFPGQDGLAGPKGAPGERGPSGLAG | |
| | PKGANGDPGRPGEPGLPGARGLTGRPGDAGPQGKVGPSGAPGEDGRPGPPGPQG | |
| | ARGQPGVMGFPGPKGANGEPGKAGEKGLPGAPGLRGLPGKDGETGAAGPPGPAG | |
| | PAGERGEQGAPGPSGFQGLPGPPGPPGEGGKPGDQGVPGEAGAPGLVGPRGERG | |
| | FPGERGSPGAQGLQGPRGLPGTPGTDGPKGASGPAGPPGAQGPPGLQGMPGERG | |
| | AAGIAGPKGDRGDVGEKGPEGAPGKDGGRGLTGPIGPPGPAGANGEKGEVGPPG | |
| | PAGSAGARGAPGERGETGPPGPAGFAGPPGADGQPGAKGEQGEAGQKGDAGAPG | |
| | PQGPSGAPGPQGPTGVTGPKGARGAQGPPGATGFPGAAGRVGPPGSNGNPGPPG | |
| | PPGPSGKDGPKGARGDSGPPGRAGEPGLOGPAGPPGEKGEPGDDGPSGAEGPPG | |
| | PQGLAGQRGIVGLPGQRGERGFPGLPGPSGEPGKQGAPGASGDRGPPGPVGPPG | |
| | LTGPAGEPGREGSPGADGPPGRDGAAGVKGDRGETGAVGAPGAPGPPGSPGPAG | |
| | PTGKQGDRGEAGAQGPMGPSGPAGARGIQGPQGPRGDKGEAGEPGERGLKGHRG | |
| | FTGLQGLPGPPGPSGDQGASGPAGPSGPRGPPGPVGPSGKDGANGIPGPIGPPG | |
| | PRGRSGETGPAGPPGNPGPPGPPGPPGPGIDMSAFAGLGPREKGPDPLQYMRAD | |
| | QAAGGLROHDAEVDATLKSLNNQIESIRSPEGSRKNPARTCRDLKLCHPEWKSG | |
| | DYWIDPNQGCTLDAMKVFCNMETGETCVYPNPANVPKKNWWSSKSKEKKHIWFG | |
| | ETINGGFHFSYGDDNLAPNTANVOMTFLRLLSTEGSQNITYHCKNSIAYLDEAA | |
| | GNLKKALLIQGSNDVEIRAEGNSRFTYTALKDGCTKHTGKWGKTVIEYRSQKTS | |
| | RLPIIDIAPMDIGGPEQEFGVDIGPVCFL | |
| Type III, | MMSFVQKGSWLLLALLHPTIILAQQEAVEGGCSHLGQSYADRDVWKPEPCQICV | 418 |
| alpha 1 | CDSGSVLCDDIICDDQELDCPNPEIPFGECCAVCPQPPTAPTRPPNGQGPQGPK | |
| chain | GDPGPPGIPGRNGDPGIPGQPGSPGSPGPPGICESCPTGPQNYSPQYDSYDVKS | |
| | GVAVGGLAGYPGPAGPPGPPGPPGTSGHPGSPGSPGYQGPPGEPGQAGPSGPPG | |
| | PPGAIGPSGPAGKDGESGRPGRPGERGLPGPPGIKGPAGIPGFPGMKGHRGFDG | |
| | RNGEKGETGAPGLKGENGLPGENGAPGPMGPRGAPGERGRPGLPGAAGARGNDG | |
| | ARGSDGQPGPPGPPGTAGFPGSPGAKGEVGPAGSPGSNGAPGORGEPGPQGHAG | |
| | AQGPPGPPGINGSPGGKGEMGPAGIPGAPGLMGARGPPGPAGANGAPGLRGGAG | |
| | EPGKNGAKGEPGPRGERGEAGIPGVPGAKGEDGKDGSPGEPGANGLPGAAGERG | |
| | APGFRGPAGPNGIPGEKGPAGERGAPGPAGPRGAAGEPGRDGVPGGPGMRGMPG | |
| | SPGGPGSDGKPGPPGSQGESGRPGPPGPSGPRGQPGVMGFPGPKGNDGAPGKNG | |
| | ERGGPGGPGPQGPPGKNGETGPQGPPGPTGPGGDKGDTGPPGPQGLQGLPGTGG | |
| | PPGENGKPGEPGPKGDAGAPGAPGGKGDAGAPGERGPPGLAGAPGLRGGAGPPG | |
| | PEGGKGAAGPPGPPGAAGTPGLQGMPGERGGLGSPGPKGDKGEPGGPGADGVPG | |
| | KDGPRGPTGPIGPPGPAGQPGDKGEGGAPGLPGIAGPRGSPGERGETGPPGPAG | |
| | FPGAPGQNGEPGGKGERGAPGEKGEGGPPGVAGPPGGSGPAGPPGPQGVKGERG | |
| | SPGGPGAAGFPGARGLPGPPGSNGNPGPPGPSGSPGKDGPPGPAGNTGAPGSPG | |
| | VSGPKGDAGQPGEKGSPGAQGPPGAPGPLGIAGITGARGLAGPPGMPGPRGSPG | |
| | PQGVKGESGKPGANGLSGERGPPGPQGLPGLAGTAGEPGRDGNPGSDGLPGRDG | |
| | SPGGKGDRGENGSPGAPGAPGHPGPPGPVGPAGKSGDRGESGPAGPAGAPGPAG | |
| | SRGAPGPQGPRGDKGETGERGAAGIKGHRGFPGNPGAPGSPGPAGQQGAIGSPG | |
| | PAGPRGPVGPSGPPGKDGTSGHPGPIGPPGPRGNRGERGSEGSPGHPGQPGPPG | |
| | PPGAPGPCCGGVGAAAIAGIGGEKAGGFAPYYGDEPMDFKINTDEIMTSLKSVN | |
| | GQIESLISPDGSRKNPARNCRDLKFCHPELKSGEYWVDPNQGCKLDAIKVFCNM | |
| | ETGETCISANPLNVPRKHWWTDSSAEKKHVWFGESMDGGFQFSYGNPELPEDVL | |
| | DVHLAFLRLLSSRASQNITYHCKNSIAYMDQASGNVKKALKLMGSNEGEFKAEG | |
| | NSKFTYTVLEDGCTKHTGEWSKTVFEYRTRKAVRLPIVDIAPYDIGGPDQEFGV | |
| | DVGPVCFL | |
| Type IV, | MGPRLSVWLLLLPAALLLHEEHSRAAAKGGCAGSGCGKCDCHGVKGQKGERGLP | 419 |
| alpha 1 | GLOGVIGFPGMOGPEGPQGPPGQKGDTGEPGLPGTKGTRGPPGASGYPGNPGLP | |
| chain | GIPGQDGPPGPPGIPGCNGTKGERGPLGPPGLPGFAGNPGPPGLPGMKGDPGEI | |
| | LGHVPGMLLKGERGFPGIPGTPGPPGLPGLQGPVGPPGFTGPPGPPGPPGPPGE | |
| | KGQMGLSFQGPKGDKGDQGVSGPPGVPGQAQVQEKGDFATKGEKGQKGEPGFQG | |
| | MPGVGEKGEPGKPGPRGKPGKDGDKGEKGSPGFPGEPGYPGLIGRQGPQGEKGE | |
| | AGPPGPPGIVIGTGPLGEKGERGYPGTPGPRGEPGPKGFPGLPGQPGPPGLPVP | |
| | GQAGAPGFPGERGEKGDRGFPGTSLPGPSGRDGLPGPPGSPGPPGQPGYTNGIV | |
| | ECQPGPPGDQGPPGIPGQPGFIGEIGEKGQKGESCLICDIDGYRGPPGPQGPPG | |
| | EIGFPGQPGAKGDRGLPGRDGVAGVPGPQGTPGLIGQPGAKGEPGEFYFDLRLK | |
| | GDKGDPGFPGQPGMPGRAGSPGRDGHPGLPGPKGSPGSVGLKGERGPPGGVGFP | |
| | GSRGDTGPPGPPGYGPAGPIGDKGQAGFPGGPGSPGLPGPKGEPGKIVPLPGPP | |
| | GAEGLPGSPGFPGPQGDRGFPGTPGRPGLPGEKGAVGQPGIGFPGPPGPKGVDG | |
| | LPGDMGPPGTPGRPGFNGLPGNPGVQGQKGEPGVGLPGLKGLPGLPGIPGTPGE | |
| | KGSIGVPGVPGEHGAIGPPGLQGIRGEPGPPGLPGSVGSPGVPGIGPPGARGPP | |
| | GGQGPPGLSGPPGIKGEKGFPGFPGLDMPGPKGDKGAQGLPGITGQSGLPGLPG | |
| | QQGAPGIPGFPGSKGEMGVMGTPGQPGSPGPVGAPGLPGEKGDHGFPGSSGPRG | |
| | DPGLKGDKGDVGLPGKPGSMDKVDMGSMKGQKGDQGEKGQIGPIGEKGSRGDPG | |
| | TPGVPGKDGQAGQPGQPGPKGDPGISGTPGAPGLPGPKGSVGGMGLPGTPGEKG | |
| | VPGIPGPQGSPGLPGDKGAKGEKGOAGPPGIGIPGLRGEKGDQGIAGFPGSPGE | |
| | KGEKGSIGIPGMPGSPGLKGSPGSVGYPGSPGLPGEKGDKGLPGLDGIPGVKGE | |
| | AGLPGTPGPTGPAGQKGEPGSDGIPGSAGEKGEPGLPGRGFPGFPGAKGDKGSK | |
| | GEVGFPGLAGSPGIPGSKGEQGFMGPPGPQGQPGLPGSPGHATEGPKGDRGPQG | |
| | QPGLPGLPGPMGPPGLPGIDGVKGDKGNPGWPGAPGVPGPKGDPGFQGMPGIGG | |
| | SPGITGSKGDMGPPGVPGFQGPKGLPGLQGIKGDQGDQGVPGAKGLPGPPGPPG | |
| | PYDIIKGEPGLPGPEGPPGLKGLQGLPGPKGQQGVTGLVGIPGPPGIPGFDGAP | |
| | GQKGEMGPAGPTGPRGFPGPPGPDGLPGSMGPPGTPSVDHGFLVTRHSQTIDDP | |
| | QCPSGTKILYHGYSLLYVQGNERAHGQDLGTAGSCLRKFSTMPFLFCNINNVCN | |
| | FASRNDYSYWLSTPEPMPMSMAPITGENIRPFISRCAVCEAPAMVMAVHSQTIQ | |
| | IPPCPSGWSSLWIGYSFVMHTSAGAEGSGQALASPGSCLEEFRSAPFIECHGRG | |
| | TCNYYANAYSFWLATIERSEMFKKPTPSTLKAGELRTHVSRCQVCMRRT | |
| Type IV, | MGRDORAVAGPALRRWLLLGTVTVGFLAQSVLAGVKKFDVPCGGRDCSGGCQCY | 420 |
| alpha 2 | PEKGGRGQPGPVGPQGYNGPPGLQGFPGLQGRKGDKGERGAPGVTGPKGDVGAR | |
| chain | GVSGFPGADGIPGHPGQGGPRGRPGYDGCNGTQGDSGPQGPPGSEGFTGPPGPQ | |
| | GPKGQKGEPYALPKEERDRYRGEPGEPGLVGFQGPPGRPGHVGQMGPVGAPGRP | |
| | GPPGPPGPKGQQGNRGLGFYGVKGEKGDVGQPGPNGIPSDTLHPIIAPTGVTFH | |
| | PDQYKGEKGSEGEPGIRGISLKGEEGIMGFPGLRGYPGLSGEKGSPGQKGSRGL | |
| | DGYQGPDGPRGPKGEAGDPGPPGLPAYSPHPSLAKGARGDPGFPGAQGEPGSQG | |
| | EPGDPGLPGPPGLSIGDGDQRRGLPGEMGPKGFIGDPGIPALYGGPPGPDGKRG | |
| | PPGPPGLPGPPGPDGFLFGLKGAKGRAGFPGLPGSPGARGPKGWKGDAGECRCT | |
| | EGDEAIKGLPGLPGPKGFAGINGEPGRKGDRGDPGQHGLPGFPGLKGVPGNIGA | |
| | PGPKGAKGDSRTITTKGERGQPGVPGVPGMKGDDGSPGRDGLDGFPGLPGPPGD | |
| | GIKGPPGDPGYPGIPGTKGTPGEMGPPGLGLPGLKGQRGFPGDAGLPGPPGFLG | |
| | PPGPAGTPGQIDCDTDVKRAVGGDRQEAIQPGCIGGPKGLPGLPGPPGPTGAKG | |
| | LRGIPGFAGADGGPGPRGLPGDAGREGFPGPPGFIGPRGSKGAVGLPGPDGSPG | |
| | PIGLPGPDGPPGERGLPGEVLGAQPGPRGDAGVPGQPGLKGLPGDRGPPGFRGS | |
| | QGMPGMPGLKGQPGLPGPSGQPGLYGPPGLHGFPGAPGQEGPLGLPGIPGREGL | |
| | PGDRGDPGDTGAPGPVGMKGLSGDRGDAGFTGEQGHPGSPGFKGIDGMPGTPGL | |
| | KGDRGSPGMDGFQGMPGLKGRPGFPGSKGEAGFFGIPGLKGLAGEPGFKGSRGD | |
| | PGPPGPPPVILPGMKDIKGEKGDEGPMGLKGYLGAKGIQGMPGIPGLSGIPGLP | |
| | GRPGHIKGVKGDIGVPGIPGLPGFPGVAGPPGITGFPGFIGSRGDKGAPGRAGL | |
| | YGEIGATGDFGDIGDTINLPGRPGLKGERGTTGIPGLKGFFGEKGTEGDIGFPG | |
| | ITGVTGVQGPPGLKGQTGFPGLTGPPGSQGELGRIGLPGGKGDDGWPGAPGLPG | |
| | FPGLRGIRGLHGLPGTKGFPGSPGSDIHGDPGFPGPPGERGDPGEANTLPGPVG | |
| | VPGQKGDQGAPGERGPPGSPGLQGFPGITPPSNISGAPGDKGAPGIFGLKGYRG | |
| | PPGPPGSAALPGSKGDTGNPGAPGTPGTKGWAGDSGPQGRPGVFGLPGEKGPRG | |
| | EQGFMGNTGPTGAVGDRGPKGPKGDPGFPGAPGTVGAPGIAGIPQKIAVQPGTV | |
| | GPQGRRGPPGAPGEMGPQGPPGEPGFRGAPGKAGPQGRGGVSAVPGFRGDEGPI | |
| | GHQGPIGQEGAPGRPGSPGLPGMPGRSVSIGYLLVKHSQTDQEPMCPVGMNKLW | |
| | SGYSLLYFEGQEKAHNQDLGLAGSCLARFSTMPFLYCNPGDVCYYASRNDKSYW | |
| | LSTTAPLPMMPVAEDEIKPYISRCSVCEAPAIAIAVHSQDVSIPHCPAGWRSLW | |
| | IGYSFLMHTAAGDEGGGQSLVSPGSCLEDFRATPFIECNGGRGTCHYYANKYSF | |
| | WLTTIPEQSFOGSPSADTLKAGLIRTHISRCQVCMKNL | |
| Type V, | MDVHTRWKARSALRPGAPLLPPLLLLLLWAPPPSRAAQPADLLKVLDFHNLPDG | 421 |
| alpha 1 | ITKTTGFCATRRSSKGPDVAYRVTKDAQLSAPTKOLYPASAFPEDFSILTTVKA | |
| chain | KKGSQAFLVSIYNEQGIQQIGLELGRSPVFLYEDHTGKPGPEDYPLFRGINLSD | |
| | FEGDIQQLLFVSDHRAAYDYCEHYSPDCDTAVPDTPQSQDPNPDEYYTEGDGEG | |
| | ETYYYEYPYYEDPEDLGKEPTPSKKPVEAAKETTEVPEELTPTPTEAAPMPETS | |
| | EGAGKEEDVGIGDYDYVPSEDYYTPSPYDDLTYGEGEENPDQPTDPGAGAEIPT | |
| | STADTSNSSNPAPPPGEGADDLEGEFTEETIRNLDENYYDPYYDPTSSPSEIGP | |
| | GMPANQDTIYEGIGGPRGEKGQKGEPAIIEPGMLIEGPPGPEGPAGLPGPPGTM | |
| | GPTGQVGDPGERGPPGRPGLPGADGLPGPPGTMLMLPFRFGGGGDAGSKGPMVS | |
| | AQESQAQAILQQARLALRGPAGPMGLTGRPGPVGPPGSGGLKGEPGDVGPQGPR | |
| | GVQGPPGPAGKPGRRGRAGSDGARGMPGQTGPKGDRGFDGLAGLPGEKGHRGDP | |
| | GPSGPPGPPGDDGERGDDGEVGPRGLPGEPGPRGLLGPKGPPGPPGPPGVTGMD | |
| | GQPGPKGNVGPQGEPGPPGQQGNPGAQGLPGPQGAIGPPGEKGPLGKPGLPGMP | |
| | GADGPPGHPGKEGPPGEKGGQGPPGPQGPIGYPGPRGVKGADGIRGLKGTKGEK | |
| | GEDGFPGFKGDMGIKGDRGEIGPPGPRGEDGPEGPKGRGGPNGDPGPLGPPGEK | |
| | GKLGVPGLPGYPGRQGPKGSIGFPGFPGANGEKGGRGTPGKPGPRGQRGPTGPR | |
| | GERGPRGITGKPGPKGNSGGDGPAGPPGERGPNGPQGPTGFPGPKGPPGPPGKD | |
| | GLPGHPGQRGETGFQGKTGPPGPPGVVGPQGPTGETGPMGERGHPGPPGPPGEQ | |
| | GLPGLAGKEGTKGDPGPAGLPGKDGPPGLRGFPGDRGLPGPVGALGLKGNEGPP | |
| | GPPGPAGSPGERGPAGAAGPIGIPGRPGPQGPPGPAGEKGAPGEKGPQGPAGRD | |
| | GLQGPVGLPGPAGPVGPPGEDGDKGEIGEPGQKGSKGDKGEQGPPGPTGPQGPI | |
| | GOPGPSGADGEPGPRGQQGLFGQKGDEGPRGFPGPPGPVGLQGLPGPPGEKGET | |
| | GDVGQMGPPGPPGPRGPSGAPGADGPQGPPGGIGNPGAVGEKGEPGEAGEPGLP | |
| | GEGGPPGPKGERGEKGESGPSGAAGPPGPKGPPGDDGPKGSPGPVGFPGDPGPP | |
| | GEPGPAGQDGPPGDKGDDGEPGQTGSPGPTGEPGPSGPPGKRGPPGPAGPEGRQ | |
| | GEKGAKGEAGLEGPPGKTGPIGPQGAPGKPGPDGLRGIPGPVGEQGLPGSPGPD | |
| | GPPGPMGPPGLPGLKGDSGPKGEKGHPGLIGLIGPPGEQGEKGDRGLPGPQGSS | |
| | GPKGEQGITGPSGPIGPPGPPGLPGPPGPKGAKGSSGPTGPKGEAGHPGPPGPP | |
| | GPPGEVIQPLPIQASRTRRNIDASQLLDDGNGENYVDYADGMEEIFGSLNSLKL | |
| | EIEQMKRPLGTQQNPARTCKDLQLCHPDFPDGEYWVDPNQGCSRDSFKVYCNFT | |
| | AGGSTCVFPDKKSEGARITSWPKENPGSWFSEFKRGKLLSYVDAEGNPVGVVQM | |
| | TFLRLLSASAHQNVTYHCYQSVAWQDAATGSYDKALRFLGSNDEEMSYDNNPYI | |
| | RALVDGCATKKGYQKTVLEIDTPKVEQVPIVDIMFNDFGEASQKFGFEVGPACF | |
| | MG | |

[0393] Thus, in certain embodiments, an antibody, or antigen-binding fragment thereof, specifically binds to a denature human collagen type I, II, III, IV, and/or V polypeptide selected from Table C1. In some embodiments, an antibody, or antigen-binding fragment thereof, specifically binds to denatured human collagen type I, II, III, IV, and V polypeptides from Table C1. In some instances, an antibody, or antigen-binding fragment thereof, specifically binds to a denatured human type IV collagen polypeptide from Table C1, and does not substantially bind to the human collagen type I, II, III, or V polypeptides. In some instances, an antibody, or antigen-binding fragment thereof, specifically binds to a denatured human type I collagen polypeptide from Table C1, and does not substantially bind to a denatured human collagen type IV or V polypeptide.

[0394] As noted above, an antibody, or antigen-binding fragment thereof, binds to denatured human collagen type I, II, III, IV, and/or V polypeptide at a “cryptic collagen epitope”. A “cryptic collagen epitope” refers to an epitope of a collagen molecule that is less accessible to immunoglobulin binding in a native collagen polypeptide than in a denatured collagen polypeptide. Thus, in certain embodiments, an antibody, or antigen-binding fragment thereof, having binding specificity for a cryptic collagen epitope preferentially binds to a denatured human collagen polypeptide relative to a native human collagen polypeptide, that is, has a higher binding affinity for a denatured human collagen polypeptide relative to the corresponding native human collagen polypeptide. For example, in some embodiments, an antibody, or antigen-binding fragment thereof, has about or at least about 2, 3, 4, 5, 6, 7, 8, 9, 10, 15, 20, 25, 30, 35, 40, 50, 60, 70, 80, 90, or 100-fold or more higher binding affinity for a denatured human collagen polypeptide than it has for the corresponding native human collagen polypeptide. In some instances, a cryptic collagen epitope is a linear epitope. In some instances, a cryptic collagen epitope is a non-linear or conformational epitope. Candidate cryptic collagen epitopes can be identified, for example, by examining the three dimensional structure of a native triple helical collagen (see, for example, Fidler et al., J. Cell Sci. 131, doi:10.1242/jcs.203950, 2018). Peptide sequences that are not solvent exposed or are only partially solvent exposed in the native structure are potential cryptic collagen epitopes.

[0395] In certain embodiments, the cryptic collagen epitope is the HU177 cryptic collagen epitope (see, for example, Caron et al., Am. J. of Pathology. 186:1649-1661, 2016; Freimark et al., Molecular Immunology. 44:3741-3750, 2007; U.S. Pat. Nos. 8,025,883; and 7,566,770). In some instances, an antibody, or antigen-binding fragment thereof, specifically binds to denatured human collagen type I, II, III, IV, and/or V polypeptides at the HU177 cryptic collagen epitope. In some instances, an antibody, or antigen-binding fragment thereof, competitively inhibits binding of the HU177 antibody to a denatured human collagen type I, II, III, IV, and/or V polypeptide. In some instances, the HU177 cryptic collagen epitope comprises PGXP (SEQ ID NO:422), LPGXPG (SEQ ID NO: 423), and/or GPP′GXP′G (SEQ ID NO:424), wherein X is any amino acid, and wherein P′ is hydroxylproline.

[0396] In certain embodiments, the cryptic collagen epitope is the HUIV26 cryptic collagen epitope (see, for example, Favreau et al., Cancer Med. 3:265-272, 2014; and U.S. Pat. Nos. 8,025,883; and 7,566,770). In some instances, an antibody, or antigen-binding fragment thereof, specifically binds to a denatured human collagen type IV polypeptide at the HUIV26 cryptic collagen epitope. In some instances, an antibody, or antigen-binding fragment thereof, competitively inhibits binding of the HUIV26 antibody to a denatured human collagen type IV polypeptide.

[0397] In some instances, the cryptic collagen epitope is the XL313 cryptic collagen epitope (see, for example, Ames et al., J Biol Chem. 291:2731-50, 2016; U.S. Pat. Nos. 8,025,883; and 7,566,770). In some instances, an antibody, or antigen-binding fragment thereof, specifically binds to denatured human collagen type I and/or III polypeptides at the XL313 cryptic collagen epitope, and does not substantially bind to a denatured human collagen type IV or V polypeptide. In some instances, an antibody, or antigen-binding fragment thereof, competitively inhibits binding of the XL313 antibody to denatured human collagen type I and/or III polypeptides. In some instances, the XL313 cryptic collagen epitope comprises RGDKGE (SEQ ID NO: 425).

[0398] In certain embodiments, an antibody or antigen-binding fragment thereof is characterized by or comprises a heavy chain variable (V_{H}) region that comprises complementary determining region V_{H}CDR1, V_{H}CDR2, and V_{H}CDR3 sequences, and a light chain variable (V_{L}) region that comprises complementary determining region V_{L}CDR1, V_{L}CDR2, and V_{L}CDR3 sequences. Exemplary V_{H}CDR1, V_{H}CDR2, V_{H}CDR3, V_{L}CDR1, V_{L}CDR2, and V_{L}CDR3 sequences are provided in Table A1 below.

TABLE A1
Exemplary CDR Sequences

| | | |
|---|---|---|
| | | SEQ ID |
| Description | Sequence | NO: |

P27122713

| | | |
|---|---|---|
| V_{H}CDR1 | TSGMGVG | 1 |
| V_{H}CDR2 | DIWWDDNKYANPSLKS | 2 |
| V_{H}CDR3 | RANYGNPYYAQDY | 3 |
| V_{L}CDR1 | RSSQSIVHSNGNTYLE | 4 |
| V_{L}CDR2 | KVSNRFS | 5 |
| V_{L}CDR3 | FQGSHVPWT | 6 |

P27122714

| | | |
|---|---|---|
| V_{H}CDR1 | TSGMGVG | 7 |
| V_{H}CDR2 | DIWWDDNKYANPSLKS | 8 |
| V_{H}CDR3 | RANYGNPYYAQDY | 9 |
| V_{L}CDR1 | RSSQSIVHSQGNTYLE | 10 |
| V_{L}CDR2 | KVSNRFS | 11 |
| V_{L}CDR3 | FQGSHVPWT | 12 |

P27122716

| | | |
|---|---|---|
| V_{H}CDR1 | TSGMGVG | 13 |
| V_{H}CDR2 | DIWWDDNKYANPSLKS | 14 |
| V_{H}CDR3 | RANYGNPYYAQDY | 15 |
| V_{L}CDR1 | RSSQSIVSSWGNTYLE | 16 |
| V_{L}CDR2 | KVSNRFS | 17 |
| V_{L}CDR3 | FQGSHVPWT | 18 |

P27152716

| | | |
|---|---|---|
| V_{H}CDR1 | TPGMGVW | 19 |
| V_{H}CDR2 | DIWWDDNKYTNPSLKS | 20 |
| V_{H}CDR3 | RANYGNPYYAQDY | 21 |
| V_{L}CDR1 | RSSQSIVSSWGNTYLE | 22 |
| V_{L}CDR2 | KVSNRFS | 23 |
| V_{L}CDR3 | FQGSHVPWT | 24 |

P27152714

| | | |
|---|---|---|
| V_{H}CDR1 | TPGMGVW | 25 |
| V_{H}CDR2 | DIWWDDNKYTNPSLKS | 26 |
| V_{H}CDR3 | RANYGNPYYAQDY | 27 |
| V_{L}CDR1 | RSSQSIVHSQGNTYLE | 28 |
| V_{L}CDR2 | KVSNRFS | 29 |
| V_{L}CDR3 | FQGSHVPWT | 30 |

P27522716

| | | |
|---|---|---|
| V_{H}CDR1 | TPGMGVW | 31 |
| V_{H}CDR2 | DIWWDDNKYTNPSLKS | 32 |
| V_{H}CDR3 | RANYGNPYYAQDY | 33 |
| V_{L}CDR1 | RSSQSIVSSWGNTYLE | 34 |
| V_{L}CDR2 | KVSNRFS | 35 |
| V_{L}CDR3 | FQGSHVPWT | 36 |

P27532716

| | | |
|---|---|---|
| V_{H}CDR1 | TPGMGVW | 37 |
| V_{H}CDR2 | DIWWDDNKYTNPSLKS | 38 |
| V_{H}CDR3 | RANYGNPYYAQDY | 39 |
| V_{L}CDR1 | RSSQSIVSSWGNTYLE | 40 |
| V_{L}CDR2 | KVSNRFS | 41 |
| V_{L}CDR3 | FQGSHVPWT | 42 |

P27542716

| | | |
|---|---|---|
| V_{H}CDR1 | TPGMGVW | 43 |
| V_{H}CDR2 | DIWWDDNKYTNPSLKS | 44 |
| V_{H}CDR3 | RANYGNPYYAQDY | 45 |
| V_{L}CDR1 | RSSQSIVSSWGNTYLE | 46 |
| V_{L}CDR2 | KVSNRFS | 47 |
| V_{L}CDR3 | FQGSHVPWT | 48 |

P27552716

| | | |
|---|---|---|
| V_{H}CDR1 | TPGMGVW | 49 |
| V_{H}CDR2 | DIWWDDNKYTNPSLKS | 50 |
| V_{H}CDR3 | RANYGNPYYAQDY | 51 |
| V_{L}CDR1 | RSSQSIVSSWGNTYLE | 52 |
| V_{L}CDR2 | KVSNRFS | 53 |
| V_{L}CDR3 | FQGSHVPWT | 54 |

P27562716

| | | |
|---|---|---|
| V_{H}CDR1 | TPGMGVW | 55 |
| V_{H}CDR2 | DIWWDDNKYTNPSLKS | 56 |
| V_{H}CDR3 | RANYGNPYYAQDY | 57 |
| V_{L}CDR1 | RSSQSIVSSWGNTYLE | 58 |
| V_{L}CDR2 | KVSNRFS | 59 |
| V_{L}CDR3 | FQGSHVPWT | 60 |

P27572716

| | | |
|---|---|---|
| V_{H}CDR1 | TPGMGVW | 61 |
| V_{H}CDR2 | DIWWDDNKYTNPSLKS | 62 |
| V_{H}CDR3 | RANYGNPYYAQDY | 63 |
| V_{L}CDR1 | RSSQSIVSSWGNTYLE | 64 |
| V_{L}CDR2 | KVSNRFS | 65 |
| V_{L}CDR3 | FQGSHVPWT | 66 |

P27582716

| | | |
|---|---|---|
| V_{H}CDR1 | TPGMGVW | 67 |
| V_{H}CDR2 | DIWWDDNKYTNPSLKS | 68 |
| V_{H}CDR3 | RANYGNPYYAQDY | 69 |
| V_{L}CDR1 | RSSQSIVSSWGNTYLE | 70 |
| V_{L}CDR2 | KVSNRFS | 71 |
| V_{L}CDR3 | FQGSHVPWT | 72 |

P27592716

| | | |
|---|---|---|
| V_{H}CDR1 | TPGMGVW | 73 |
| V_{H}CDR2 | DIWWDDNKYTNPSLKS | 74 |
| V_{H}CDR3 | RANYGNPYYAQDY | 75 |
| V_{L}CDR1 | RSSQSIVSSWGNTYLE | 76 |
| V_{L}CDR2 | KVSNRFS | 77 |
| V_{L}CDR3 | FQGSHVPWT | 78 |

P27602716

| | | |
|---|---|---|
| V_{H}CDR1 | TPGMGVW | 79 |
| V_{H}CDR2 | DIWWDDNKYTNPSLKS | 80 |
| V_{H}CDR3 | RANYGNPYYAQDY | 81 |
| V_{L}CDR1 | RSSQSIVSSWGNTYLE | 82 |
| V_{L}CDR2 | KVSNRFS | 83 |
| V_{L}CDR3 | FQGSHVPWT | 84 |

P27612716

| | | |
|---|---|---|
| V_{H}CDR1 | TPGMGVW | 85 |
| V_{H}CDR2 | DIWWDDNKYTNPSLKS | 86 |
| V_{H}CDR3 | RANYGNPYYAQDY | 87 |
| V_{L}CDR1 | RSSQSIVSSWGNTYLE | 88 |
| V_{L}CDR2 | KVSNRFS | 89 |
| V_{L}CDR3 | FQGSHVPWT | 90 |

P27622716

| | | |
|---|---|---|
| V_{H}CDR1 | TPGMGVW | 91 |
| V_{H}CDR2 | DIWWDDNKYTNPSLKS | 92 |
| V_{H}CDR3 | RANYGNPYYAQDY | 93 |
| V_{L}CDR1 | RSSQSIVSSWGNTYLE | 94 |
| V_{L}CDR2 | KVSNRFS | 95 |
| V_{L}CDR3 | FQGSHVPWT | 96 |

P27632716

| | | |
|---|---|---|
| V_{H}CDR1 | TPGMGVW | 97 |
| V_{H}CDR2 | DIWWDDNKYTNPSLKS | 98 |
| V_{H}CDR3 | RANYGNPYYAQDY | 99 |
| V_{L}CDR1 | RSSQSIVSSWGNTYLE | 100 |
| V_{L}CDR2 | KVSNRFS | 101 |
| V_{L}CDR3 | FQGSHVPWT | 102 |

P27642716

| | | |
|---|---|---|
| V_{H}CDR1 | TPGMGVW | 103 |
| V_{H}CDR2 | DIWWDDNKYTNPSLKS | 104 |
| V_{H}CDR3 | RANYGNPYYAQDY | 105 |
| V_{L}CDR1 | RSSQSIVSSWGNTYLE | 106 |
| V_{L}CDR2 | KVSNRFS | 107 |
| V_{L}CDR3 | FQGSHVPWT | 108 |

P27652716

| | | |
|---|---|---|
| V_{H}CDR1 | TPGMGVW | 109 |
| V_{H}CDR2 | DIWWDDNKYTNPSLKS | 110 |
| V_{H}CDR3 | RANYGNPYYAQDY | 111 |
| V_{L}CDR1 | RSSQSIVSSWGNTYLE | 112 |
| V_{L}CDR2 | KVSNRFS | 113 |
| V_{L}CDR3 | FQGSHVPWT | 114 |

P27662716

| | | |
|---|---|---|
| V_{H}CDR1 | TPGMGVW | 115 |
| V_{H}CDR2 | DIWWDDNKYTNPSLKS | 116 |
| V_{H}CDR3 | RANYGNPYYAQDY | 117 |
| V_{L}CDR1 | RSSQSIVSSWGNTYLE | 118 |
| V_{L}CDR2 | KVSNRFS | 119 |
| V_{L}CDR3 | FQGSHVPWT | 120 |

P27122797

| | | |
|---|---|---|
| V_{H}CDR1 | TSGMGVG | 121 |
| V_{H}CDR2 | DIWWDDNKYANPSLKS | 122 |
| V_{H}CDR3 | RANYGNPYYAQDY | 123 |
| V_{L}CDR1 | RSSQSIVHSSGNTYLE | 124 |
| V_{L}CDR2 | KVSNRFS | 125 |
| V_{L}CDR3 | FQGSHVPWT | 126 |

P27122798

| | | |
|---|---|---|
| V_{H}CDR1 | TSGMGVG | 127 |
| V_{H}CDR2 | DIWWDDNKYANPSLKS | 128 |
| V_{H}CDR3 | RANYGNPYYAQDY | 129 |
| V_{L}CDR1 | RSSQSIVHSNANTYLE | 130 |
| V_{L}CDR2 | KVSNRFS | 131 |
| V_{L}CDR3 | FQGSHVPWT | 132 |

P27152797

| | | |
|---|---|---|
| V_{H}CDR1 | TPGMGVW | 133 |
| V_{H}CDR2 | DIWWDDNKYTNPSLKS | 134 |
| V_{H}CDR3 | RANYGNPYYAQDY | 135 |
| V_{L}CDR1 | RSSQSIVHSSGNTYLE | 136 |
| V_{L}CDR2 | KVSNRFS | 137 |
| V_{L}CDR3 | FQGSHVPWT | 138 |

P27152798

| | | |
|---|---|---|
| V_{H}CDR1 | TPGMGVW | 139 |
| V_{H}CDR2 | DIWWDDNKYTNPSLKS | 140 |
| V_{H}CDR3 | RANYGNPYYAQDY | 141 |
| V_{L}CDR1 | RSSQSIVHSNANTYLE | 142 |
| V_{L}CDR2 | KVSNRFS | 143 |
| V_{L}CDR3 | FQGSHVPWT | 144 |

P29342939

| | | |
|---|---|---|
| V_{H}CDR1 | RYWMT | 145 |
| V_{H}CDR2 | EINPDSSTANYTPYLKD | 146 |
| V_{H}CDR3 | PVDGYYDAMDP | 147 |
| V_{L}CDR1 | KSSQSLLNWYNQKNYLA | 148 |
| V_{L}CDR2 | GASTRES | 149 |
| V_{L}CDR3 | QNDHQYPYT | 150 |

P29352939

| | | |
|---|---|---|
| V_{H}CDR1 | RYWMT | 151 |
| V_{H}CDR2 | EINPDSSTANYTPYLKD | 152 |
| V_{H}CDR3 | PVDGYYDAMDP | 153 |
| V_{L}CDR1 | KSSQSLLNWYNQKNYLA | 154 |
| V_{L}CDR2 | GASTRES | 155 |
| V_{L}CDR3 | QNDHQYPYT | 156 |

P29362939

| | | |
|---|---|---|
| V_{H}CDR1 | RYWMT | 157 |
| V_{H}CDR2 | EINPDSSTANYTPYLKD | 158 |
| V_{H}CDR3 | PVDGYYDAMDP | 159 |
| V_{L}CDR1 | KSSQSLLNWYNQKNYLA | 160 |
| V_{L}CDR2 | GASTRES | 161 |
| V_{L}CDR3 | QNDHQYPYT | 162 |

P29372939

| | | |
|---|---|---|
| V_{H}CDR1 | RYWMT | 163 |
| V_{H}CDR2 | EINPDSSTANYTPYLKD | 164 |
| V_{H}CDR3 | PVDGYYDAMDP | 165 |
| V_{L}CDR1 | KSSQSLLNWYNQKNYLA | 166 |
| V_{L}CDR2 | GASTRES | 167 |
| V_{L}CDR3 | QNDHQYPYT | 168 |

P29382939

| | | |
|---|---|---|
| V_{H}CDR1 | RYWMT | 169 |
| V_{H}CDR2 | EINPDSSTANYTPYLKG | 170 |
| V_{H}CDR3 | PVDGYYDAMDP | 171 |
| V_{L}CDR1 | KSSQSLLNWYNQKNYLA | 172 |
| V_{L}CDR2 | GASTRES | 173 |
| V_{L}CDR3 | QNDHQYPYT | 174 |

P30392939

| | | |
|---|---|---|
| V_{H}CDR1 | RYWMT | 175 |
| V_{H}CDR2 | EINPDASTANYTPYLKG | 176 |
| V_{H}CDR3 | PVDGYYDAMDP | 177 |
| V_{L}CDR1 | KSSQSLLNWYNQKNYLA | 178 |
| V_{L}CDR2 | GASTRES | 179 |
| V_{L}CDR3 | QNDHQYPYT | 180 |

P30402939

| | | |
|---|---|---|
| V_{H}CDR1 | RYWMT | 181 |
| V_{H}CDR2 | EINPDSSTANYTPYLKG | 182 |
| V_{H}CDR3 | PVDAYYDAMDP | 183 |
| V_{L}CDR1 | KSSQSLLNWYNQKNYLA | 184 |
| V_{L}CDR2 | GASTRES | 185 |
| V_{L}CDR3 | QNDHQYPYT | 186 |

P30412939

| | | |
|---|---|---|
| V_{H}CDR1 | RYWMT | 187 |
| V_{H}CDR2 | EINPDASTANYTPYLKG | 188 |
| V_{H}CDR3 | PVDAYYDAMDP | 189 |
| V_{L}CDR1 | KSSQSLLNWYNQKNYLA | 190 |
| V_{L}CDR2 | GASTRES | 191 |
| V_{L}CDR3 | QNDHQYPYT | 192 |

P30422939

| | | |
|---|---|---|
| V_{H}CDR1 | RYWMT | 193 |
| V_{H}CDR2 | EINPDSSTANYTPYLKD | 194 |
| V_{H}CDR3 | PVDGYYDAMDY | 195 |
| V_{L}CDR1 | KSSQSLLNWYNQKNYLA | 196 |
| V_{L}CDR2 | GASTRES | 197 |
| V_{L}CDR3 | QNDHQYPYT | 198 |

P30432939

| | | |
|---|---|---|
| V_{H}CDR1 | RYWMT | 199 |
| V_{H}CDR2 | EINPDSSTANYTPYLKD | 200 |
| V_{H}CDR3 | PVDGYYDAMDN | 201 |
| V_{L}CDR1 | KSSQSLLNWYNQKNYLA | 202 |
| V_{L}CDR2 | GASTRES | 203 |
| V_{L}CDR3 | QNDHQYPYT | 204 |

P30442939

| | | |
|---|---|---|
| V_{H}CDR1 | RYWMT | 205 |
| V_{H}CDR2 | EINPDSSTANYTPYLKG | 206 |
| V_{H}CDR3 | PVDGYYDAMDY | 207 |
| V_{L}CDR1 | KSSQSLLNWYNQKNYLA | 208 |
| V_{L}CDR2 | GASTRES | 209 |
| V_{L}CDR3 | QNDHQYPYT | 210 |

P30452939

| | | |
|---|---|---|
| V_{H}CDR1 | RYWMT | 211 |
| V_{H}CDR2 | EINPDSSTANYTPYLKG | 212 |
| V_{H}CDR3 | PVDGYYDAMDN | 213 |
| V_{L}CDR1 | KSSQSLLNWYNQKNYLA | 214 |
| V_{L}CDR2 | GASTRES | 215 |
| V_{L}CDR3 | QNDHQYPYT | 216 |

P30393046

| | | |
|---|---|---|
| V_{H}CDR1 | RYWMT | 217 |
| V_{H}CDR2 | EINPDASTANYTPYLKG | 218 |
| V_{H}CDR3 | PVDGYYDAMDP | 219 |
| V_{L}CDR1 | KSSQSLLNRYNQKNYLA | 220 |
| V_{L}CDR2 | GASTRES | 221 |
| V_{L}CDR3 | QNDHQYPYT | 222 |

P30403046

| | | |
|---|---|---|
| V_{H}CDR1 | RYWMT | 223 |
| V_{H}CDR2 | EINPDSSTANYTPYLKG | 224 |
| V_{H}CDR3 | PVDAYYDAMDP | 225 |
| V_{L}CDR1 | KSSQSLLNRYNQKNYLA | 226 |
| V_{L}CDR2 | GASTRES | 227 |
| V_{L}CDR3 | QNDHQYPYT | 228 |

P30413046

| | | |
|---|---|---|
| V_{H}CDR1 | RYWMT | 229 |
| V_{H}CDR2 | EINPDASTANYTPYLKG | 230 |
| V_{H}CDR3 | PVDAYYDAMDP | 231 |
| V_{L}CDR1 | KSSQSLLNRYNQKNYLA | 232 |
| V_{L}CDR2 | GASTRES | 233 |
| V_{L}CDR3 | QNDHQYPYT | 234 |

P30423046

| | | |
|---|---|---|
| V_{H}CDR1 | RYWMT | 235 |
| V_{H}CDR2 | EINPDSSTANYTPYLKD | 236 |
| V_{H}CDR3 | PVDGYYDAMDY | 237 |
| V_{L}CDR1 | KSSQSLLNRYNQKNYLA | 238 |
| V_{L}CDR2 | GASTRES | 239 |
| V_{L}CDR3 | QNDHQYPYT | 240 |

P30433046

| | | |
|---|---|---|
| V_{H}CDR1 | RYWMT | 241 |
| V_{H}CDR2 | EINPDSSTANYTPYLKD | 242 |
| V_{H}CDR3 | PVDGYYDAMDN | 243 |
| V_{L}CDR1 | KSSQSLLNRYNQKNYLA | 244 |
| V_{L}CDR2 | GASTRES | 245 |
| V_{L}CDR3 | QNDHQYPYT | 246 |

P30443046

| | | |
|---|---|---|
| V_{H}CDR1 | RYWMT | 247 |
| V_{H}CDR2 | EINPDSSTANYTPYLKG | 248 |
| V_{H}CDR3 | PVDGYYDAMDY | 249 |
| V_{L}CDR1 | KSSQSLLNRYNQKNYLA | 250 |
| V_{L}CDR2 | GASTRES | 251 |
| V_{L}CDR3 | QNDHQYPYT | 252 |

P30453046

| | | |
|---|---|---|
| V_{H}CDR1 | RYWMT | 253 |
| V_{H}CDR2 | EINPDSSTANYTPYLKG | 254 |
| V_{H}CDR3 | PVDGYYDAMDN | 255 |
| V_{L}CDR1 | KSSQSLLNRYNQKNYLA | 256 |
| V_{L}CDR2 | GASTRES | 257 |
| V_{L}CDR3 | QNDHQYPYT | 258 |

HU177

| | | |
|---|---|---|
| V_{H}CDR1 | TSGMGVG | 259 |
| V_{H}CDR2 | DIWWDDNKYYNPSLKS | 260 |
| V_{H}CDR3 | RANYGNPYYAMDY | 261 |
| V_{L}CDR1 | RSSQSIVHSNGNTYLE | 262 |
| V_{L}CDR2 | KVSNRFS | 263 |
| V_{L}CDR3 | FQGSHVPWT | 264 |

HUIV26

| | | |
|---|---|---|
| V_{H}CDR1 | RYWMS | 265 |
| V_{H}CDR2 | EINPDSSTINYTPSLKD | 266 |
| V_{H}CDR3 | PVDGYYDAMDY | 267 |
| V_{L}CDR1 | KSSQSLLNSGNQKNYLA | 268 |
| V_{L}CDR2 | GASTRES | 269 |
| V_{L}CDR3 | QNDHSYPYT | 270 |

[0399] Thus, in certain embodiments, an antibody or antigen-binding fragment thereof comprises a heavy chain variable (V_{H}) region that comprises complementary determining region V_{H}CDR1, V_{H}CDR2, and V_{H}CDR3 sequences selected from Table A1, and variants thereof which specifically bind to a denatured human collagen polypeptide (selected, for example, from Table C1); and a light chain variable (V_{L}) region that comprises V_{L}CDR1, V_{L}CDR2, and V_{L}CDR3 sequences selected from Table A1, and variants thereof which specifically bind to a denatured human collagen polypeptide (selected, for example, from Table C1).

[0400] In certain embodiments, the CDR regions are as follows:

[0401] the V_{H}CDR1, a V_{H}CDR2, and V_{H}CDR3 regions respectively comprise SEQ ID NOs: 1-3; and the V_{L}CDR1, V_{L}CDR2, and V_{L}CDR3 regions respectively comprise SEQ ID NOs: 4-6;

[0402] the V_{H}CDR1, a V_{H}CDR2, and V_{H}CDR3 regions respectively comprise SEQ ID NOs: 7-9; and the V_{L}CDR1, V_{L}CDR2, and V_{L}CDR3 regions respectively comprise SEQ ID NOs: 10-12;

[0403] the V_{H}CDR1, a V_{H}CDR2, and V_{H}CDR3 regions respectively comprise SEQ ID NOs: 13-15; and the V_{L}CDR1, V_{L}CDR2, and V_{L}CDR3 regions respectively comprise SEQ ID NOs: 16-18;

[0404] the V_{H}CDR1, a V_{H}CDR2, and V_{H}CDR3 regions respectively comprise SEQ ID NOs: 19-21; and the V_{L}CDR1, V_{L}CDR2, and V_{L}CDR3 regions respectively comprise SEQ ID NOs: 22-24;

[0405] the V_{H}CDR1, a V_{H}CDR2, and V_{H}CDR3 regions respectively comprise SEQ ID NOs: 25-27; and the V_{L}CDR1, V_{L}CDR2, and V_{L}CDR3 regions respectively comprise SEQ ID NOs: 28-30;

[0406] the V_{H}CDR1, a V_{H}CDR2, and V_{H}CDR3 regions respectively comprise SEQ ID NOs: 31-33; and the V_{L}CDR1, V_{L}CDR2, and V_{L}CDR3 regions respectively comprise SEQ ID NOs: 34-36;

[0407] the V_{H}CDR1, a V_{H}CDR2, and V_{H}CDR3 regions respectively comprise SEQ ID NOs: 37-39; and the V_{L}CDR1, V_{L}CDR2, and V_{L}CDR3 regions respectively comprise SEQ ID NOs: 40-42;

[0408] the V_{H}CDR1, a V_{H}CDR2, and V_{H}CDR3 regions respectively comprise SEQ ID NOs: 43-45; and the V_{L}CDR1, V_{L}CDR2, and V_{L}CDR3 regions respectively comprise SEQ ID NOs: 46-48;

[0409] the V_{H}CDR1, a V_{H}CDR2, and V_{H}CDR3 regions respectively comprise SEQ ID NOs: 49-51; and the V_{L}CDR1, V_{L}CDR2, and V_{L}CDR3 regions respectively comprise SEQ ID NOs: 52-54;

[0410] the V_{H}CDR1, a V_{H}CDR2, and V_{H}CDR3 regions respectively comprise SEQ ID NOs: 55-57; and the V_{L}CDR1, V_{L}CDR2, and V_{L}CDR3 regions respectively comprise SEQ ID NOs: 58-60;

[0411] the V_{H}CDR1, a V_{H}CDR2, and V_{H}CDR3 regions respectively comprise SEQ ID NOs: 61-63; and the V_{L}CDR1, V_{L}CDR2, and V_{L}CDR3 regions respectively comprise SEQ ID NOs: 64-66;

[0412] the V_{H}CDR1, a V_{H}CDR2, and V_{H}CDR3 regions respectively comprise SEQ ID NOs: 67-69; and the V_{L}CDR1, V_{L}CDR2, and V_{L}CDR3 regions respectively comprise SEQ ID NOs: 70-72;

[0413] the V_{H}CDR1, a V_{H}CDR2, and V_{H}CDR3 regions respectively comprise SEQ ID NOs: 73-75; and the V_{L}CDR1, V_{L}CDR2, and V_{L}CDR3 regions respectively comprise SEQ ID NOs: 76-78;

[0414] the V_{H}CDR1, a V_{H}CDR2, and V_{H}CDR3 regions respectively comprise SEQ ID NOs: 79-81; and the V_{L}CDR1, V_{L}CDR2, and V_{L}CDR3 regions respectively comprise SEQ ID NOs: 82-84;

[0415] the V_{H}CDR1, a V_{H}CDR2, and V_{H}CDR3 regions respectively comprise SEQ ID NOs: 85-87; and the V_{L}CDR1, V_{L}CDR2, and V_{L}CDR3 regions respectively comprise SEQ ID NOs: 88-90;

[0416] the V_{H}CDR1, a V_{H}CDR2, and V_{H}CDR3 regions respectively comprise SEQ ID NOs: 91-93; and the V_{L}CDR1, V_{L}CDR2, and V_{L}CDR3 regions respectively comprise SEQ ID NOs: 94-96;

[0417] the V_{H}CDR1, a V_{H}CDR2, and V_{H}CDR3 regions respectively comprise SEQ ID NOs: 97-99; and the V_{L}CDR1, V_{L}CDR2, and V_{L}CDR3 regions respectively comprise SEQ ID NOs: 100-102;

[0418] the V_{H}CDR1, a V_{H}CDR2, and V_{H}CDR3 regions respectively comprise SEQ ID NOs: 103-105; and the V_{L}CDR1, V_{L}CDR2, and V_{L}CDR3 regions respectively comprise SEQ ID NOs: 106-108;

[0419] the V_{H}CDR1, a V_{H}CDR2, and V_{H}CDR3 regions respectively comprise SEQ ID NOs: 109-111; and the V_{L}CDR1, V_{L}CDR2, and V_{L}CDR3 regions respectively comprise SEQ ID NOs: 112-114;

[0420] the V_{H}CDR1, a V_{H}CDR2, and V_{H}CDR3 regions respectively comprise SEQ ID NOs: 115-117; and the V_{L}CDR1, V_{L}CDR2, and V_{L}CDR3 regions respectively comprise SEQ ID NOs: 118-120;

[0421] the V_{H}CDR1, a V_{H}CDR2, and V_{H}CDR3 regions respectively comprise SEQ ID NOs: 121-123; and the V_{L}CDR1, V_{L}CDR2, and V_{L}CDR3 regions respectively comprise SEQ ID NOs: 124-126;

[0422] the V_{H}CDR1, a V_{H}CDR2, and V_{H}CDR3 regions respectively comprise SEQ ID NOs: 127-129; and the V_{L}CDR1, V_{L}CDR2, and V_{L}CDR3 regions respectively comprise SEQ ID NOs: 130-132;

[0423] the V_{H}CDR1, a V_{H}CDR2, and V_{H}CDR3 regions respectively comprise SEQ ID NOs: 133-135; and the V_{L}CDR1, V_{L}CDR2, and V_{L}CDR3 regions respectively comprise SEQ ID NOs: 136-138;

[0424] the V_{H}CDR1, a V_{H}CDR2, and V_{H}CDR3 regions respectively comprise SEQ ID NOs: 139-141; and the V_{L}CDR1, V_{L}CDR2, and V_{L}CDR3 regions respectively comprise SEQ ID NOs: 142-144;

[0425] the V_{H}CDR1, a V_{H}CDR2, and V_{H}CDR3 regions respectively comprise SEQ ID NOs: 145-147; and the V_{L}CDR1, V_{L}CDR2, and V_{L}CDR3 regions respectively comprise SEQ ID NOs: 148-150;

[0426] the V_{H}CDR1, a V_{H}CDR2, and V_{H}CDR3 regions respectively comprise SEQ ID NOs: 151-153; and the V_{L}CDR1, V_{L}CDR2, and V_{L}CDR3 regions respectively comprise SEQ ID NOs: 154-156;

[0427] the V_{H}CDR1, a V_{H}CDR2, and V_{H}CDR3 regions respectively comprise SEQ ID NOs: 157-159; and the V_{L}CDR1, V_{L}CDR2, and V_{L}CDR3 regions respectively comprise SEQ ID NOs: 160-162;

[0428] the V_{H}CDR1, a V_{H}CDR2, and V_{H}CDR3 regions respectively comprise SEQ ID NOs: 163-165; and the V_{L}CDR1, V_{L}CDR2, and V_{L}CDR3 regions respectively comprise SEQ ID NOs: 166-168;

[0429] the V_{H}CDR1, a V_{H}CDR2, and V_{H}CDR3 regions respectively comprise SEQ ID NOs: 169-171; and the V_{L}CDR1, V_{L}CDR2, and V_{L}CDR3 regions respectively comprise SEQ ID NOs: 172-174;

[0430] the V_{H}CDR1, a V_{H}CDR2, and V_{H}CDR3 regions respectively comprise SEQ ID NOs: 175-177; and the V_{L}CDR1, V_{L}CDR2, and V_{L}CDR3 regions respectively comprise SEQ ID NOs: 178-180;

[0431] the V_{H}CDR1, a V_{H}CDR2, and V_{H}CDR3 regions respectively comprise SEQ ID NOs: 181-183; and the V_{L}CDR1, V_{L}CDR2, and V_{L}CDR3 regions respectively comprise SEQ ID NOs: 184-186;

[0432] the V_{H}CDR1, a V_{H}CDR2, and V_{H}CDR3 regions respectively comprise SEQ ID NOs: 187-189; and the V_{L}CDR1, V_{L}CDR2, and V_{L}CDR3 regions respectively comprise SEQ ID NOs: 190-192;

[0433] the V_{H}CDR1, a V_{H}CDR2, and V_{H}CDR3 regions respectively comprise SEQ ID NOs: 193-195; and the V_{L}CDR1, V_{L}CDR2, and V_{L}CDR3 regions respectively comprise SEQ ID NOs: 196-198;

[0434] the V_{H}CDR1, a V_{H}CDR2, and V_{H}CDR3 regions respectively comprise SEQ ID NOs: 199-201; and the V_{L}CDR1, V_{L}CDR2, and V_{L}CDR3 regions respectively comprise SEQ ID NOs: 202-204;

[0435] the V_{H}CDR1, a V_{H}CDR2, and V_{H}CDR3 regions respectively comprise SEQ ID NOs: 205-207; and the V_{L}CDR1, V_{L}CDR2, and V_{L}CDR3 regions respectively comprise SEQ ID NOs: 208-210;

[0436] the V_{H}CDR1, a V_{H}CDR2, and V_{H}CDR3 regions respectively comprise SEQ ID NOs: 211-213; and the V_{L}CDR1, V_{L}CDR2, and V_{L}CDR3 regions respectively comprise SEQ ID NOs: 214-216;

[0437] the V_{H}CDR1, a V_{H}CDR2, and V_{H}CDR3 regions respectively comprise SEQ ID NOs: 217-219; and the V_{L}CDR1, V_{L}CDR2, and V_{L}CDR3 regions respectively comprise SEQ ID NOs: 220-222;

[0438] the V_{H}CDR1, a V_{H}CDR2, and V_{H}CDR3 regions respectively comprise SEQ ID NOs: 223-225; and the V_{L}CDR1, V_{L}CDR2, and V_{L}CDR3 regions respectively comprise SEQ ID NOs: 226-228;

[0439] the V_{H}CDR1, a V_{H}CDR2, and V_{H}CDR3 regions respectively comprise SEQ ID NOs: 229-231; and the V_{L}CDR1, V_{L}CDR2, and V_{L}CDR3 regions respectively comprise SEQ ID NOs: 232-234;

[0440] the V_{H}CDR1, a V_{H}CDR2, and V_{H}CDR3 regions respectively comprise SEQ ID NOs: 235-237; and the V_{L}CDR1, V_{L}CDR2, and V_{L}CDR3 regions respectively comprise SEQ ID NOs: 238-240;

[0441] the V_{H}CDR1, a V_{H}CDR2, and V_{H}CDR3 regions respectively comprise SEQ ID NOs: 241-243; and the V_{L}CDR1, V_{L}CDR2, and V_{L}CDR3 regions respectively comprise SEQ ID NOs: 244-246;

[0442] the V_{H}CDR1, a V_{H}CDR2, and V_{H}CDR3 regions respectively comprise SEQ ID NOs: 247-249; and the V_{L}CDR1, V_{L}CDR2, and V_{L}CDR3 regions respectively comprise SEQ ID NOs: 250-252;

[0443] the V_{H}CDR1, a V_{H}CDR2, and V_{H}CDR3 regions respectively comprise SEQ ID NOs: 253-255; and the V_{L}CDR1, V_{L}CDR2, and V_{L}CDR3 regions respectively comprise SEQ ID NOs: 256-258;

[0444] the V_{H}CDR1, a V_{H}CDR2, and V_{H}CDR3 regions respectively comprise SEQ ID NOs: 259-261; and the V_{L}CDR1, V_{L}CDR2, and V_{L}CDR3 regions respectively comprise SEQ ID NOs: 262-264; or

[0445] the V_{H}CDR1, a V_{H}CDR2, and V_{H}CDR3 regions respectively comprise SEQ ID NOs: 265-267; and the V_{L}CDR1, V_{L}CDR2, and V_{L}CDR3 regions respectively comprise SEQ ID NOs: 268-270.

[0446] Also included are variants of the foregoing CDR sequences, including affinity matured variants, which bind to a denatured human collage polypeptide (see Table C1), for example, variants having 1, 2, 3, 4, 5, 6, 7, or 8 total alterations in one or more of the CDR regions, for example, one or more the V_{H}CDR1, V_{H}CDR2, V_{H}CDR3, V_{L}CDR1, V_{L}CDR2, and/or V_{L}CDR3 sequences described herein. Exemplary “alterations” include amino acid substitutions, additions, and deletions.

[0447] In certain embodiments, an antibody, or antigen-binding fragment thereof, is characterized by or comprises a heavy chain (V_{H} region, Fc region) and a light chain (V_{L} region). Exemplary heavy and light chain sequences are provided in Table A2 below.

| | | |
|---|---|---|
| | | SEQ ID |
| Description | Sequence | NO: |

P27122713

| | | |
|---|---|---|
| Heavy Chain | QVTLKESGPALVKPTQTLTLTCTFSGFSLSTSGMGVGWIRQPPGKALE | 271 |
| | WLADIWWDDNKYANPSLKSRLTISKDTSKNQVVLTMTNMDPVDTATYY | |
| | CARRANYGNPYYAQDYWGQGTTVTVSSASTKGPSVFPLAPSSKSTSGG | |
| | TAALGCLVKDYFPEPVTVSWNSGALTSGVHTFPAVLQSSGLYSLSSVV | |
| | TVPSSSLGTQTYICNVNHKPSNTKVDKKVEPKSCDKTHTCPPCPAPEA | |
| | AGGPSVFLFPPKPKDTLMISRTPEVTCVVVDVSHEDPEVKFNWYVDGV | |
| | EVHNAKTKPREEQYNSTYRVVSVLTVLHQDWLNGKEYKCKVSNKALAA | |
| | PIEKTISKAKGQPREPQVYTLPPSRDELTKNQVSLTCLVKGFYPSDIA | |
| | VEWESNGQPENNYKTTPPVLDSDGSFFLYSKLTVDKSRWQQGNVFSCS | |
| | VMHEALHNHYTQKSLSLSPGK | |
| Light Chain | DIVMTQTPLSLPVTPGEPASISCRSSQSIVHSNGNTYLEWYLQKPGQS | 272 |
| | POLLIYKVSNRFSGVPDRFSGSGSGTDFTLKISRVEAEDVGVYYCFQG | |
| | SHVPWTFGQGTKVEIKRTVAAPSVFIFPPSDEQLKSGTASVVCLLNNF | |
| | YPREAKVQWKVDNALQSGNSQESVTEQDSKDSTYSLSSTLTLSKADYE | |
| | KHKVYACEVTHQGLSSPVTKSFNRGEC | |

P27122714

| | | |
|---|---|---|
| Heavy Chain | QVTLKESGPALVKPTQTLTLTCTFSGFSLSTSGMGVGWIRQPPGKALE | 273 |
| | WLADIWWDDNKYANPSLKSRLTISKDTSKNQVVLTMTNMDPVDTATYY | |
| | CARRANYGNPYYAQDYWGQGTTVTVSSASTKGPSVFPLAPSSKSTSGG | |
| | TAALGCLVKDYFPEPVTVSWNSGALTSGVHTFPAVLQSSGLYSLSSVV | |
| | TVPSSSLGTQTYICNVNHKPSNTKVDKKVEPKSCDKTHTCPPCPAPEA | |
| | AGGPSVFLFPPKPKDTLMISRTPEVTCVVVDVSHEDPEVKFNWYVDGV | |
| | EVHNAKTKPREEQYNSTYRVVSVLTVLHQDWLNGKEYKCKVSNKALAA | |
| | PIEKTISKAKGQPREPQVYTLPPSRDELTKNQVSLTCLVKGFYPSDIA | |
| | VEWESNGQPENNYKTTPPVLDSDGSFFLYSKLTVDKSRWQQGNVFSCS | |
| | VMHEALHNHYTQKSLSLSPGK | |
| Light Chain | DIVMTQTPLSLPVTPGEPASISCRSSQSIVHSQGNTYLEWYLQKPGQS | 274 |
| | POLLIYKVSNRFSGVPDRFSGSGSGTDFTLKISRVEAEDVGVYYCFQG | |
| | SHVPWTFGQGTKVEIKRTVAAPSVFIFPPSDEQLKSGTASVVCLLNNF | |
| | YPREAKVQWKVDNALQSGNSQESVTEQDSKDSTYSLSSTLTLSKADYE | |
| | KHKVYACEVTHQGLSSPVTKSFNRGEC | |

P27122716

| | | |
|---|---|---|
| Heavy Chain | QVTLKESGPALVKPTQTLTLTCTFSGFSLSTSGMGVGWIRQPPGKALE | 275 |
| | WLADIWWDDNKYANPSLKSRLTISKDTSKNQVVLTMTNMDPVDTATYY | |
| | CARRANYGNPYYAQDYWGQGTTVTVSSASTKGPSVFPLAPSSKSTSGG | |
| | TAALGCLVKDYFPEPVTVSWNSGALTSGVHTFPAVLQSSGLYSLSSVV | |
| | TVPSSSLGTQTYICNVNHKPSNTKVDKKVEPKSCDKTHTCPPCPAPEA | |
| | AGGPSVFLFPPKPKDTLMISRTPEVTCVVVDVSHEDPEVKFNWYVDGV | |
| | EVHNAKTKPREEQYNSTYRVVSVLTVLHQDWLNGKEYKCKVSNKALAA | |
| | PIEKTISKAKGQPREPQVYTLPPSRDELTKNQVSLTCLVKGFYPSDIA | |
| | VEWESNGQPENNYKTTPPVLDSDGSFFLYSKLTVDKSRWQQGNVFSCS | |
| | VMHEALHNHYTQKSLSLSPGK | |
| Light Chain | DIVMTQTPLSLPVTPGEPASISCRSSQSIVSSWGNTYLEWYLQKPGQS | 276 |
| | POLLIYKVSNRFSGVPDRFSGSGSGTDFTLKISRVEAEDVGVYYCFQG | |
| | SHVPWTFGQGTKVEIKRTVAAPSVFIFPPSDEQLKSGTASVVCLLNNF | |
| | YPREAKVQWKVDNALQSGNSQESVTEQDSKDSTYSLSSTLTLSKADYE | |
| | KHKVYACEVTHQGLSSPVTKSFNRGEC | |

P27152716

| | | |
|---|---|---|
| Heavy Chain | QVTLKESGPALVKPTQTLTLTCTFSGFSLSTPGMGVWWIRQPPGKALE | 277 |
| | WLADIWWDDNKYTNPSLKSRLTISKDTSKNQVVLTMTNMDPVDTATYY | |
| | CARRANYGNPYYAQDYWGQGTTVTVSSASTKGPSVFPLAPSSKSTSGG | |
| | TAALGCLVKDYFPEPVTVSWNSGALTSGVHTFPAVLQSSGLYSLSSVV | |
| | TVPSSSLGTQTYICNVNHKPSNTKVDKKVEPKSCDKTHTCPPCPAPEA | |
| | AGGPSVFLFPPKPKDTLMISRTPEVTCVVVDVSHEDPEVKFNWYVDGV | |
| | EVHNAKTKPREEQYNSTYRVVSVLTVLHQDWLNGKEYKCKVSNKALAA | |
| | PIEKTISKAKGQPREPQVYTLPPSRDELTKNQVSLTCLVKGFYPSDIA | |
| | VEWESNGQPENNYKTTPPVLDSDGSFFLYSKLTVDKSRWQQGNVFSCS | |
| | VMHEALHNHYTQKSLSLSPGK | |
| Light Chain | DIVMTQTPLSLPVTPGEPASISCRSSQSIVSSWGNTYLEWYLQKPGQS | 278 |
| | PQLLIYKVSNRFSGVPDRFSGSGSGTDFTLKISRVEAEDVGVYYCFQG | |
| | SHVPWTFGQGTKVEIKRTVAAPSVFIFPPSDEQLKSGTASVVCLLNNF | |
| | YPREAKVQWKVDNALQSGNSQESVTEQDSKDSTYSLSSTLTLSKADYE | |
| | KHKVYACEVTHQGLSSPVTKSFNRGEC | |

P27152714

| | | |
|---|---|---|
| Heavy Chain | QVTLKESGPALVKPTQTLTLTCTFSGFSLSTPGMGVWWIRQPPGKALE | 279 |
| | WLADIWWDDNKYTNPSLKSRLTISKDTSKNQVVLTMTNMDPVDTATYY | |
| | CARRANYGNPYYAQDYWGQGTTVTVSSASTKGPSVFPLAPSSKSTSGG | |
| | TAALGCLVKDYFPEPVTVSWNSGALTSGVHTFPAVLQSSGLYSLSSVV | |
| | TVPSSSLGTQTYICNVNHKPSNTKVDKKVEPKSCDKTHTCPPCPAPEA | |
| | AGGPSVFLFPPKPKDTLMISRTPEVTCVVVDVSHEDPEVKFNWYVDGV | |
| | EVHNAKTKPREEQYNSTYRVVSVLTVLHQDWLNGKEYKCKVSNKALAA | |
| | PIEKTISKAKGQPREPQVYTLPPSRDELTKNQVSLTCLVKGFYPSDIA | |
| | VEWESNGQPENNYKTTPPVLDSDGSFFLYSKLTVDKSRWQQGNVFSCS | |
| | VMHEALHNHYTQKSLSLSPGK | |
| Light Chain | DIVMTQTPLSLPVTPGEPASISCRSSQSIVHSQGNTYLEWYLQKPGQS | 280 |
| | POLLIYKVSNRFSGVPDRFSGSGSGTDFTLKISRVEAEDVGVYYCFQG | |
| | SHVPWTFGQGTKVEIKRTVAAPSVFIFPPSDEQLKSGTASVVCLLNNF | |
| | YPREAKVQWKVDNALQSGNSQESVTEQDSKDSTYSLSSTLTLSKADYE | |
| | KHKVYACEVTHQGLSSPVTKSFNRGEC | |

P27522716

| | | |
|---|---|---|
| Heavy Chain | EVQLVESGGGLVQPGGSLRLSCAASGFSFSTPGMGVWWVRQAPGKGLE | 281 |
| | WVADIWWDDNKYTNPSLKSRFTISRDNAKNSLYLQMNSLRAEDTAVYY | |
| | CARRANYGNPYYAQDYWGQGTTVTVSSASTKGPSVFPLAPSSKSTSGG | |
| | TAALGCLVKDYFPEPVTVSWNSGALTSGVHTFPAVLQSSGLYSLSSVV | |
| | TVPSSSLGTQTYICNVNHKPSNTKVDKKVEPKSCDKTHTCPPCPAPEA | |
| | AGGPSVFLFPPKPKDTLMISRTPEVTCVVVDVSHEDPEVKFNWYVDGV | |
| | EVHNAKTKPREEQYNSTYRVVSVLTVLHQDWLNGKEYKCKVSNKALAA | |
| | PIEKTISKAKGQPREPQVYTLPPSRDELTKNQVSLTCLVKGFYPSDIA | |
| | VEWESNGQPENNYKTTPPVLDSDGSFFLYSKLTVDKSRWQQGNVFSCS | |
| | VMHEALHNHYTQKSLSLSPGK | |
| Light Chain | DIVMTQTPLSLPVTPGEPASISCRSSQSIVSSWGNTYLEWYLQKPGQS | 282 |
| | POLLIYKVSNRFSGVPDRFSGSGSGTDFTLKISRVEAEDVGVYYCFQG | |
| | SHVPWTFGQGTKVEIKRTVAAPSVFIFPPSDEQLKSGTASVVCLLNNF | |
| | YPREAKVQWKVDNALQSGNSQESVTEQDSKDSTYSLSSTLTLSKADYE | |
| | KHKVYACEVTHQGLSSPVTKSFNRGEC | |

P27532716

| | | |
|---|---|---|
| Heavy Chain | EVQLVESGGGLVQPGGSLRLSCAASGFTLSTPGMGVWWVRQAPGKGLE | 283 |
| | WVADIWWDDNKYTNPSLKSRFTISRDNAKNSLYLQMNSLRAEDTAVYY | |
| | CARRANYGNPYYAQDYWGQGTTVTVSSASTKGPSVFPLAPSSKSTSGG | |
| | TAALGCLVKDYFPEPVTVSWNSGALTSGVHTFPAVLQSSGLYSLSSVV | |
| | TVPSSSLGTQTYICNVNHKPSNTKVDKKVEPKSCDKTHTCPPCPAPEA | |
| | AGGPSVFLFPPKPKDTLMISRTPEVTCVVVDVSHEDPEVKFNWYVDGV | |
| | EVHNAKTKPREEQYNSTYRVVSVLTVLHQDWLNGKEYKCKVSNKALAA | |
| | PIEKTISKAKGQPREPQVYTLPPSRDELTKNQVSLTCLVKGFYPSDIA | |
| | VEWESNGQPENNYKTTPPVLDSDGSFFLYSKLTVDKSRWQQGNVFSCS | |
| | VMHEALHNHYTQKSLSLSPGK | |
| Light Chain | DIVMTQTPLSLPVTPGEPASISCRSSQSIVSSWGNTYLEWYLQKPGQS | 284 |
| | POLLIYKVSNRFSGVPDRFSGSGSGTDFTLKISRVEAEDVGVYYCFQG | |
| | SHVPWTFGQGTKVEIKRTVAAPSVFIFPPSDEQLKSGTASVVCLLNNF | |
| | YPREAKVQWKVDNALQSGNSQESVTEQDSKDSTYSLSSTLTLSKADYE | |
| | KHKVYACEVTHQGLSSPVTKSFNRGEC | |

P27542716

| | | |
|---|---|---|
| Heavy Chain | EVQLVESGGGLVQPGGSLRLSCAASGFSLSTPGMGVWWVRQAPGKGLE | 285 |
| | WVADIWWDDNKYTNPSLKSRFTISRDNAKNSLYLQMNSLRAEDTAVYY | |
| | CARRANYGNPYYAQDYWGQGTTVTVSSASTKGPSVFPLAPSSKSTSGG | |
| | TAALGCLVKDYFPEPVTVSWNSGALTSGVHTFPAVLQSSGLYSLSSVV | |
| | TVPSSSLGTQTYICNVNHKPSNTKVDKKVEPKSCDKTHTCPPCPAPEA | |
| | AGGPSVFLFPPKPKDTLMISRTPEVTCVVVDVSHEDPEVKFNWYVDGV | |
| | EVHNAKTKPREEQYNSTYRVVSVLTVLHQDWLNGKEYKCKVSNKALAA | |
| | PIEKTISKAKGQPREPQVYTLPPSRDELTKNQVSLTCLVKGFYPSDIA | |
| | VEWESNGQPENNYKTTPPVLDSDGSFFLYSKLTVDKSRWQQGNVFSCS | |
| | VMHEALHNHYTQKSLSLSPGK | |
| Light Chain | DIVMTQTPLSLPVTPGEPASISCRSSQSIVSSWGNTYLEWYLQKPGQS | 286 |
| | PQLLIYKVSNRFSGVPDRFSGSGSGTDFTLKISRVEAEDVGVYYCFQG | |
| | SHVPWTFGQGTKVEIKRTVAAPSVFIFPPSDEQLKSGTASVVCLLNNF | |
| | YPREAKVQWKVDNALQSGNSQESVTEQDSKDSTYSLSSTLTLSKADYE | |
| | KHKVYACEVTHQGLSSPVTKSFNRGEC | |

P27552716

| | | |
|---|---|---|
| Heavy Chain | EVQLVESGGGLVQPGGSLRLSCAASGFTFSTPGMGVWWIRQAPGKGLE | 287 |
| | WVADIWWDDNKYTNPSLKSRFTISRDNAKNSLYLOMNSLRAEDTAVYY | |
| | CARRANYGNPYYAQDYWGQGTTVTVSSASTKGPSVFPLAPSSKSTSGG | |
| | TAALGCLVKDYFPEPVTVSWNSGALTSGVHTFPAVLQSSGLYSLSSVV | |
| | TVPSSSLGTQTYICNVNHKPSNTKVDKKVEPKSCDKTHTCPPCPAPEA | |
| | AGGPSVFLFPPKPKDTLMISRTPEVTCVVVDVSHEDPEVKFNWYVDGV | |
| | EVHNAKTKPREEQYNSTYRVVSVLTVLHQDWLNGKEYKCKVSNKALAA | |
| | PIEKTISKAKGQPREPQVYTLPPSRDELTKNQVSLTCLVKGFYPSDIA | |
| | VEWESNGQPENNYKTTPPVLDSDGSFFLYSKLTVDKSRWQQGNVFSCS | |
| | VMHEALHNHYTQKSLSLSPGK | |
| Light Chain | DIVMTQTPLSLPVTPGEPASISCRSSQSIVSSWGNTYLEWYLQKPGQS | 288 |
| | PQLLIYKVSNRFSGVPDRFSGSGSGTDFTLKISRVEAEDVGVYYCFQG | |
| | SHVPWTFGQGTKVEIKRTVAAPSVFIFPPSDEQLKSGTASVVCLLNNF | |
| | YPREAKVQWKVDNALQSGNSQESVTEQDSKDSTYSLSSTLTLSKADYE | |
| | KHKVYACEVTHQGLSSPVTKSFNRGEC | |

P27562716

| | | |
|---|---|---|
| Heavy Chain | EVQLVESGGGLVQPGGSLRLSCAASGFTFSTPGMGVWWVRQAPGKGLE | 289 |
| | WLADIWWDDNKYTNPSLKSRFTISRDNAKNSLYLQMNSLRAEDTAVYY | |
| | CARRANYGNPYYAQDYWGQGTTVTVSSASTKGPSVFPLAPSSKSTSGG | |
| | TAALGCLVKDYFPEPVTVSWNSGALTSGVHTFPAVLQSSGLYSLSSVV | |
| | TVPSSSLGTQTYICNVNHKPSNTKVDKKVEPKSCDKTHTCPPCPAPEA | |
| | AGGPSVFLFPPKPKDTLMISRTPEVTCVVVDVSHEDPEVKFNWYVDGV | |
| | EVHNAKTKPREEQYNSTYRVVSVLTVLHQDWLNGKEYKCKVSNKALAA | |
| | PIEKTISKAKGQPREPQVYTLPPSRDELTKNQVSLTCLVKGFYPSDIA | |
| | VEWESNGQPENNYKTTPPVLDSDGSFFLYSKLTVDKSRWQQGNVFSCS | |
| | VMHEALHNHYTQKSLSLSPGK | |
| Light Chain | DIVMTQTPLSLPVTPGEPASISCRSSQSIVSSWGNTYLEWYLQKPGQS | 290 |
| | POLLIYKVSNRFSGVPDRFSGSGSGTDFTLKISRVEAEDVGVYYCFQG | |
| | SHVPWTFGQGTKVEIKRTVAAPSVFIFPPSDEQLKSGTASVVCLLNNF | |
| | YPREAKVQWKVDNALQSGNSQESVTEQDSKDSTYSLSSTLTLSKADYE | |
| | KHKVYACEVTHQGLSSPVTKSFNRGEC | |

P27572716

| | | |
|---|---|---|
| Heavy Chain | EVQLVESGGGLVQPGGSLRLSCAASGFTFSTPGMGVWWVRQAPGKGLE | 291 |
| | WVADIWWDDNKYTNPSLKSRLTISRDNAKNSLYLQMNSLRAEDTAVYY | |
| | CARRANYGNPYYAQDYWGQGTTVTVSSASTKGPSVFPLAPSSKSTSGG | |
| | TAALGCLVKDYFPEPVTVSWNSGALTSGVHTFPAVLQSSGLYSLSSVV | |
| | TVPSSSLGTQTYICNVNHKPSNTKVDKKVEPKSCDKTHTCPPCPAPEA | |
| | AGGPSVFLFPPKPKDTLMISRTPEVTCVVVDVSHEDPEVKFNWYVDGV | |
| | EVHNAKTKPREEQYNSTYRVVSVLTVLHQDWLNGKEYKCKVSNKALAA | |
| | PIEKTISKAKGQPREPQVYTLPPSRDELTKNQVSLTCLVKGFYPSDIA | |
| | VEWESNGQPENNYKTTPPVLDSDGSFFLYSKLTVDKSRWQQGNVFSCS | |
| | VMHEALHNHYTQKSLSLSPGK | |
| Light Chain | DIVMTQTPLSLPVTPGEPASISCRSSQSIVSSWGNTYLEWYLQKPGQS | 292 |
| | PQLLIYKVSNRFSGVPDRFSGSGSGTDFTLKISRVEAEDVGVYYCFQG | |
| | SHVPWTFGQGTKVEIKRTVAAPSVFIFPPSDEQLKSGTASVVCLLNNF | |
| | YPREAKVQWKVDNALQSGNSQESVTEQDSKDSTYSLSSTLTLSKADYE | |
| | KHKVYACEVTHQGLSSPVTKSFNRGEC | |

P27582716

| | | |
|---|---|---|
| Heavy Chain | EVQLVESGGGLVQPGGSLRLSCAASGFSLSTPGMGVWWIRQAPGKGLE | 293 |
| | WVADIWWDDNKYTNPSLKSRLTISRDNAKNSLYLQMNSLRAEDTAVYY | |
| | CARRANYGNPYYAQDYWGQGTTVTVSSASTKGPSVFPLAPSSKSTSGG | |
| | TAALGCLVKDYFPEPVTVSWNSGALTSGVHTFPAVLQSSGLYSLSSVV | |
| | TVPSSSLGTQTYICNVNHKPSNTKVDKKVEPKSCDKTHTCPPCPAPEA | |
| | AGGPSVFLFPPKPKDTLMISRTPEVTCVVVDVSHEDPEVKFNWYVDGV | |
| | EVHNAKTKPREEQYNSTYRVVSVLTVLHQDWLNGKEYKCKVSNKALAA | |
| | PIEKTISKAKGQPREPQVYTLPPSRDELTKNQVSLTCLVKGFYPSDIA | |
| | VEWESNGQPENNYKTTPPVLDSDGSFFLYSKLTVDKSRWQQGNVFSCS | |
| | VMHEALHNHYTQKSLSLSPGK | |
| Light Chain | DIVMTQTPLSLPVTPGEPASISCRSSQSIVSSWGNTYLEWYLQKPGQS | 294 |
| | POLLIYKVSNRFSGVPDRFSGSGSGTDFTLKISRVEAEDVGVYYCFQG | |
| | SHVPWTFGQGTKVEIKRTVAAPSVFIFPPSDEQLKSGTASVVCLLNNF | |
| | YPREAKVQWKVDNALQSGNSQESVTEQDSKDSTYSLSSTLTLSKADYE | |
| | KHKVYACEVTHQGLSSPVTKSFNRGEC | |

P27592716

| | | |
|---|---|---|
| Heavy Chain | EVQLVESGGGLVQPGGSLRLSCAASGFSLSTPGMGVWWIRQAPGKGLE | 295 |
| | WLADIWWDDNKYTNPSLKSRLTISRDNAKNSLYLQMNSLRAEDTAVYY | |
| | CARRANYGNPYYAQDYWGQGTTVTVSSASTKGPSVFPLAPSSKSTSGG | |
| | TAALGCLVKDYFPEPVTVSWNSGALTSGVHTFPAVLQSSGLYSLSSVV | |
| | TVPSSSLGTQTYICNVNHKPSNTKVDKKVEPKSCDKTHTCPPCPAPEA | |
| | AGGPSVFLFPPKPKDTLMISRTPEVTCVVVDVSHEDPEVKFNWYVDGV | |
| | EVHNAKTKPREEQYNSTYRVVSVLTVLHQDWLNGKEYKCKVSNKALAA | |
| | PIEKTISKAKGQPREPQVYTLPPSRDELTKNQVSLTCLVKGFYPSDIA | |
| | VEWESNGQPENNYKTTPPVLDSDGSFFLYSKLTVDKSRWQQGNVFSCS | |
| | VMHEALHNHYTQKSLSLSPGK | |
| Light Chain | DIVMTQTPLSLPVTPGEPASISCRSSQSIVSSWGNTYLEWYLQKPGQS | 296 |
| | PQLLIYKVSNRFSGVPDRFSGSGSGTDFTLKISRVEAEDVGVYYCFQG | |
| | SHVPWTFGQGTKVEIKRTVAAPSVFIFPPSDEQLKSGTASVVCLLNNF | |
| | YPREAKVQWKVDNALQSGNSQESVTEQDSKDSTYSLSSTLTLSKADYE | |
| | KHKVYACEVTHQGLSSPVTKSFNRGEC | |

P27602716

| | | |
|---|---|---|
| Heavy Chain | EVQLVESGGGLVQPGGSLRLSCAASGFSLSTPGMGVWWVRQAPGKGLE | 297 |
| | WLADIWWDDNKYTNPSLKSRLTISKDNAKNSLYLQMNSLRAEDTAVYY | |
| | CARRANYGNPYYAQDYWGQGTTVTVSSASTKGPSVFPLAPSSKSTSGG | |
| | TAALGCLVKDYFPEPVTVSWNSGALTSGVHTFPAVLQSSGLYSLSSVV | |
| | TVPSSSLGTQTYICNVNHKPSNTKVDKKVEPKSCDKTHTCPPCPAPEA | |
| | AGGPSVFLFPPKPKDTLMISRTPEVTCVVVDVSHEDPEVKFNWYVDGV | |
| | EVHNAKTKPREEQYNSTYRVVSVLTVLHQDWLNGKEYKCKVSNKALAA | |
| | PIEKTISKAKGQPREPQVYTLPPSRDELTKNQVSLTCLVKGFYPSDIA | |
| | VEWESNGQPENNYKTTPPVLDSDGSFFLYSKLTVDKSRWQQGNVFSCS | |
| | VMHEALHNHYTQKSLSLSPGK | |
| Light Chain | DIVMTQTPLSLPVTPGEPASISCRSSQSIVSSWGNTYLEWYLQKPGQS | 298 |
| | PQLLIYKVSNRFSGVPDRFSGSGSGTDFTLKISRVEAEDVGVYYCFQG | |
| | SHVPWTFGQGTKVEIKRTVAAPSVFIFPPSDEQLKSGTASVVCLLNNF | |
| | YPREAKVQWKVDNALQSGNSQESVTEQDSKDSTYSLSSTLTLSKADYE | |
| | KHKVYACEVTHQGLSSPVTKSFNRGEC | |

P27612716

| | | |
|---|---|---|
| Heavy Chain | EVQLVESGGGLVQPGGSLRLSCAASGFSLSTPGMGVWWIRQAPGKGLE | 299 |
| | WLADIWWDDNKYTNPSLKSRLTISKDNAKNSLYLQMNSLRAEDTAVYY | |
| | CARRANYGNPYYAQDYWGQGTTVTVSSASTKGPSVFPLAPSSKSTSGG | |
| | TAALGCLVKDYFPEPVTVSWNSGALTSGVHTFPAVLQSSGLYSLSSVV | |
| | TVPSSSLGTQTYICNVNHKPSNTKVDKKVEPKSCDKTHTCPPCPAPEA | |
| | AGGPSVFLFPPKPKDTLMISRTPEVTCVVVDVSHEDPEVKFNWYVDGV | |
| | EVHNAKTKPREEQYNSTYRVVSVLTVLHQDWLNGKEYKCKVSNKALAA | |
| | PIEKTISKAKGQPREPQVYTLPPSRDELTKNQVSLTCLVKGFYPSDIA | |
| | VEWESNGQPENNYKTTPPVLDSDGSFFLYSKLTVDKSRWQQGNVFSCS | |
| | VMHEALHNHYTQKSLSLSPGK | |
| Light Chain | DIVMTQTPLSLPVTPGEPASISCRSSQSIVSSWGNTYLEWYLQKPGQS | 300 |
| | POLLIYKVSNRFSGVPDRFSGSGSGTDFTLKISRVEAEDVGVYYCFQG | |
| | SHVPWTFGQGTKVEIKRTVAAPSVFIFPPSDEQLKSGTASVVCLLNNF | |
| | YPREAKVQWKVDNALQSGNSQESVTEQDSKDSTYSLSSTLTLSKADYE | |
| | KHKVYACEVTHQGLSSPVTKSFNRGEC | |

P27622716

| | | |
|---|---|---|
| Heavy Chain | QVTLKESGPALVKPTQTLTLTCTFSGFSLSTPGMGVWWIRQPSGKALE | 301 |
| | WLADIWWDDNKYTNPSLKSRLTISKDTSKNQVVLTMTNMDPVDTATYY | |
| | CARRANYGNPYYAQDYWGQGTTVTVSSASTKGPSVFPLAPSSKSTSGG | |
| | TAALGCLVKDYFPEPVTVSWNSGALTSGVHTFPAVLQSSGLYSLSSVV | |
| | TVPSSSLGTQTYICNVNHKPSNTKVDKKVEPKSCDKTHTCPPCPAPEA | |
| | AGGPSVFLFPPKPKDTLMISRTPEVTCVVVDVSHEDPEVKFNWYVDGV | |
| | EVHNAKTKPREEQYNSTYRVVSVLTVLHQDWLNGKEYKCKVSNKALAA | |
| | PIEKTISKAKGQPREPQVYTLPPSRDELTKNQVSLTCLVKGFYPSDIA | |
| | VEWESNGQPENNYKTTPPVLDSDGSFFLYSKLTVDKSRWQQGNVFSCS | |
| | VMHEALHNHYTQKSLSLSPGK | |
| Light Chain | DIVMTQTPLSLPVTPGEPASISCRSSQSIVSSWGNTYLEWYLQKPGQS | 302 |
| | POLLIYKVSNRFSGVPDRFSGSGSGTDFTLKISRVEAEDVGVYYCFQG | |
| | SHVPWTFGQGTKVEIKRTVAAPSVFIFPPSDEQLKSGTASVVCLLNNF | |
| | YPREAKVQWKVDNALQSGNSQESVTEQDSKDSTYSLSSTLTLSKADYE | |
| | KHKVYACEVTHQGLSSPVTKSFNRGEC | |

P27632716

| | | |
|---|---|---|
| Heavy Chain | QVTLKESGPALVKPTQTLTLTCTFSGFSLSTPGMGVWWIRQPPGEALE | 303 |
| | WLADIWWDDNKYTNPSLKSRLTISKDTSKNQVVLTMTNMDPVDTATYY | |
| | CARRANYGNPYYAQDYWGQGTTVTVSSASTKGPSVFPLAPSSKSTSGG | |
| | TAALGCLVKDYFPEPVTVSWNSGALTSGVHTFPAVLQSSGLYSLSSVV | |
| | TVPSSSLGTQTYICNVNHKPSNTKVDKKVEPKSCDKTHTCPPCPAPEA | |
| | AGGPSVFLFPPKPKDTLMISRTPEVTCVVVDVSHEDPEVKFNWYVDGV | |
| | EVHNAKTKPREEQYNSTYRVVSVLTVLHQDWLNGKEYKCKVSNKALAA | |
| | PIEKTISKAKGQPREPQVYTLPPSRDELTKNQVSLTCLVKGFYPSDIA | |
| | VEWESNGQPENNYKTTPPVLDSDGSFFLYSKLTVDKSRWQQGNVFSCS | |
| | VMHEALHNHYTQKSLSLSPGK | |
| Light Chain | DIVMTQTPLSLPVTPGEPASISCRSSQSIVSSWGNTYLEWYLQKPGQS | 304 |
| | POLLIYKVSNRFSGVPDRFSGSGSGTDFTLKISRVEAEDVGVYYCFQG | |
| | SHVPWTFGQGTKVEIKRTVAAPSVFIFPPSDEQLKSGTASVVCLLNNF | |
| | YPREAKVQWKVDNALQSGNSQESVTEQDSKDSTYSLSSTLTLSKADYE | |
| | KHKVYACEVTHQGLSSPVTKSFNRGEC | |

P27642716

| | | |
|---|---|---|
| Heavy Chain | QVTLKESGPALVKPTQTLTLTCTFSGFSLSTPGMGVWWIRQPPGKGLE | 305 |
| | WLADIWWDDNKYTNPSLKSRLTISKDTSKNQVVLTMTNMDPVDTATYY | |
| | CARRANYGNPYYAQDYWGQGTTVTVSSASTKGPSVFPLAPSSKSTSGG | |
| | TAALGCLVKDYFPEPVTVSWNSGALTSGVHTFPAVLQSSGLYSLSSVV | |
| | TVPSSSLGTQTYICNVNHKPSNTKVDKKVEPKSCDKTHTCPPCPAPEA | |
| | AGGPSVFLFPPKPKDTLMISRTPEVTCVVVDVSHEDPEVKFNWYVDGV | |
| | EVHNAKTKPREEQYNSTYRVVSVLTVLHQDWLNGKEYKCKVSNKALAA | |
| | PIEKTISKAKGQPREPQVYTLPPSRDELTKNQVSLTCLVKGFYPSDIA | |
| | VEWESNGQPENNYKTTPPVLDSDGSFFLYSKLTVDKSRWQQGNVFSCS | |
| | VMHEALHNHYTQKSLSLSPGK | |
| Light Chain | DIVMTQTPLSLPVTPGEPASISCRSSQSIVSSWGNTYLEWYLQKPGQS | 306 |
| | POLLIYKVSNRFSGVPDRFSGSGSGTDFTLKISRVEAEDVGVYYCFQG | |
| | SHVPWTFGQGTKVEIKRTVAAPSVFIFPPSDEQLKSGTASVVCLLNNF | |
| | YPREAKVQWKVDNALQSGNSQESVTEQDSKDSTYSLSSTLTLSKADYE | |
| | KHKVYACEVTHQGLSSPVTKSFNRGEC | |

P27652716

| | | |
|---|---|---|
| Heavy Chain | QVTLKESGPALVKPTQTLTLTCTFSGFSLSTPGMGVWWIRQPPGEGLE | 307 |
| | WLADIWWDDNKYTNPSLKSRLTISKDTSKNQVVLTMTNMDPVDTATYY | |
| | CARRANYGNPYYAQDYWGQGTTVTVSSASTKGPSVFPLAPSSKSTSGG | |
| | TAALGCLVKDYFPEPVTVSWNSGALTSGVHTFPAVLQSSGLYSLSSVV | |
| | TVPSSSLGTQTYICNVNHKPSNTKVDKKVEPKSCDKTHTCPPCPAPEA | |
| | AGGPSVFLFPPKPKDTLMISRTPEVTCVVVDVSHEDPEVKFNWYVDGV | |
| | EVHNAKTKPREEQYNSTYRVVSVLTVLHQDWLNGKEYKCKVSNKALAA | |
| | PIEKTISKAKGQPREPQVYTLPPSRDELTKNQVSLTCLVKGFYPSDIA | |
| | VEWESNGQPENNYKTTPPVLDSDGSFFLYSKLTVDKSRWQQGNVFSCS | |
| | VMHEALHNHYTQKSLSLSPGK | |
| Light Chain | DIVMTQTPLSLPVTPGEPASISCRSSQSIVSSWGNTYLEWYLQKPGQS | 308 |
| | PQLLIYKVSNRFSGVPDRFSGSGSGTDFTLKISRVEAEDVGVYYCFQG | |
| | SHVPWTFGQGTKVEIKRTVAAPSVFIFPPSDEQLKSGTASVVCLLNNF | |
| | YPREAKVQWKVDNALQSGNSQESVTEQDSKDSTYSLSSTLTLSKADYE | |
| | KHKVYACEVTHQGLSSPVTKSFNRGEC | |

P27662716

| | | |
|---|---|---|
| Heavy Chain | QVTLKESGPALVKPTQTLTLTCTFSGFSLSTPGMGVWWIRQPSGEGLE | 309 |
| | WLADIWWDDNKYTNPSLKSRLTISKDTSKNQVVLTMTNMDPVDTATYY | |
| | CARRANYGNPYYAQDYWGQGTTVTVSSASTKGPSVFPLAPSSKSTSGG | |
| | TAALGCLVKDYFPEPVTVSWNSGALTSGVHTFPAVLQSSGLYSLSSVV | |
| | TVPSSSLGTQTYICNVNHKPSNTKVDKKVEPKSCDKTHTCPPCPAPEA | |
| | AGGPSVFLFPPKPKDTLMISRTPEVTCVVVDVSHEDPEVKFNWYVDGV | |
| | EVHNAKTKPREEQYNSTYRVVSVLTVLHQDWLNGKEYKCKVSNKALAA | |
| | PIEKTISKAKGQPREPQVYTLPPSRDELTKNQVSLTCLVKGFYPSDIA | |
| | VEWESNGQPENNYKTTPPVLDSDGSFFLYSKLTVDKSRWQQGNVFSCS | |
| | VMHEALHNHYTQKSLSLSPGK | |
| Light Chain | DIVMTQTPLSLPVTPGEPASISCRSSQSIVSSWGNTYLEWYLQKPGQS | 310 |
| | PQLLIYKVSNRFSGVPDRFSGSGSGTDFTLKISRVEAEDVGVYYCFQG | |
| | SHVPWTFGQGTKVEIKRTVAAPSVFIFPPSDEQLKSGTASVVCLLNNF | |
| | YPREAKVQWKVDNALQSGNSQESVTEQDSKDSTYSLSSTLTLSKADYE | |
| | KHKVYACEVTHQGLSSPVTKSFNRGEC | |

P27122797

| | | |
|---|---|---|
| Heavy Chain | QVTLKESGPALVKPTQTLTLTCTFSGFSLSTSGMGVGWIRQPPGKALE | 311 |
| | WLADIWWDDNKYANPSLKSRLTISKDTSKNQVVLTMTNMDPVDTATYY | |
| | CARRANYGNPYYAQDYWGQGTTVTVSSASTKGPSVFPLAPSSKSTSGG | |
| | TAALGCLVKDYFPEPVTVSWNSGALTSGVHTFPAVLQSSGLYSLSSVV | |
| | TVPSSSLGTQTYICNVNHKPSNTKVDKKVEPKSCDKTHTCPPCPAPEA | |
| | AGGPSVFLFPPKPKDTLMISRTPEVTCVVVDVSHEDPEVKFNWYVDGV | |
| | EVHNAKTKPREEQYNSTYRVVSVLTVLHQDWLNGKEYKCKVSNKALAA | |
| | PIEKTISKAKGQPREPQVYTLPPSRDELTKNQVSLTCLVKGFYPSDIA | |
| | VEWESNGQPENNYKTTPPVLDSDGSFFLYSKLTVDKSRWQQGNVFSCS | |
| | VMHEALHNHYTQKSLSLSPGK | |
| Light Chain | DIVMTQTPLSLPVTPGEPASISCRSSQSIVHSSGNTYLEWYLQKPGQS | 312 |
| | POLLIYKVSNRFSGVPDRFSGSGSGTDFTLKISRVEAEDVGVYYCFQG | |
| | SHVPWTFGQGTKVEIKRTVAAPSVFIFPPSDEQLKSGTASVVCLLNNF | |
| | YPREAKVQWKVDNALQSGNSQESVTEQDSKDSTYSLSSTLTLSKADYE | |
| | KHKVYACEVTHQGLSSPVTKSFNRGEC | |

P27122798

| | | |
|---|---|---|
| Heavy Chain | QVTLKESGPALVKPTQTLTLTCTFSGFSLSTSGMGVGWIRQPPGKALE | 313 |
| | WLADIWWDDNKYANPSLKSRLTISKDTSKNQVVLTMTNMDPVDTATYY | |
| | CARRANYGNPYYAQDYWGQGTTVTVSSASTKGPSVFPLAPSSKSTSGG | |
| | TAALGCLVKDYFPEPVTVSWNSGALTSGVHTFPAVLQSSGLYSLSSVV | |
| | TVPSSSLGTQTYICNVNHKPSNTKVDKKVEPKSCDKTHTCPPCPAPEA | |
| | AGGPSVFLFPPKPKDTLMISRTPEVTCVVVDVSHEDPEVKFNWYVDGV | |
| | EVHNAKTKPREEQYNSTYRVVSVLTVLHQDWLNGKEYKCKVSNKALAA | |
| | PIEKTISKAKGQPREPQVYTLPPSRDELTKNQVSLTCLVKGFYPSDIA | |
| | VEWESNGQPENNYKTTPPVLDSDGSFFLYSKLTVDKSRWQQGNVFSCS | |
| | VMHEALHNHYTQKSLSLSPGK | |
| Light Chain | DIVMTQTPLSLPVTPGEPASISCRSSQSIVHSNANTYLEWYLQKPGQS | 314 |
| | PQLLIYKVSNRFSGVPDRFSGSGSGTDFTLKISRVEAEDVGVYYCFQG | |
| | SHVPWTFGQGTKVEIKRTVAAPSVFIFPPSDEQLKSGTASVVCLLNNF | |
| | YPREAKVQWKVDNALQSGNSQESVTEQDSKDSTYSLSSTLTLSKADYE | |
| | KHKVYACEVTHQGLSSPVTKSFNRGEC | |

P27152797

| | | |
|---|---|---|
| Heavy Chain | QVTLKESGPALVKPTQTLTLTCTFSGFSLSTPGMGVWWIRQPPGKALE | 315 |
| | WLADIWWDDNKYTNPSLKSRLTISKDTSKNQVVLTMTNMDPVDTATYY | |
| | CARRANYGNPYYAQDYWGQGTTVTVSSASTKGPSVFPLAPSSKSTSGG | |
| | TAALGCLVKDYFPEPVTVSWNSGALTSGVHTFPAVLQSSGLYSLSSVV | |
| | TVPSSSLGTQTYICNVNHKPSNTKVDKKVEPKSCDKTHTCPPCPAPEA | |
| | AGGPSVFLFPPKPKDTLMISRTPEVTCVVVDVSHEDPEVKFNWYVDGV | |
| | EVHNAKTKPREEQYNSTYRVVSVLTVLHQDWLNGKEYKCKVSNKALAA | |
| | PIEKTISKAKGQPREPQVYTLPPSRDELTKNQVSLTCLVKGFYPSDIA | |
| | VEWESNGQPENNYKTTPPVLDSDGSFFLYSKLTVDKSRWQQGNVFSCS | |
| | VMHEALHNHYTQKSLSLSPGK | |
| Light Chain | DIVMTQTPLSLPVTPGEPASISCRSSQSIVHSSGNTYLEWYLQKPGQS | 316 |
| | POLLIYKVSNRFSGVPDRFSGSGSGTDFTLKISRVEAEDVGVYYCFQG | |
| | SHVPWTFGQGTKVEIKRTVAAPSVFIFPPSDEQLKSGTASVVCLLNNF | |
| | YPREAKVQWKVDNALQSGNSQESVTEQDSKDSTYSLSSTLTLSKADYE | |
| | KHKVYACEVTHQGLSSPVTKSFNRGEC | |

P27152798

| | | |
|---|---|---|
| Heavy Chain | QVTLKESGPALVKPTQTLTLTCTFSGFSLSTPGMGVWWIRQPPGKALE | 317 |
| | WLADIWWDDNKYTNPSLKSRLTISKDTSKNQVVLTMTNMDPVDTATYY | |
| | CARRANYGNPYYAQDYWGQGTTVTVSSASTKGPSVFPLAPSSKSTSGG | |
| | TAALGCLVKDYFPEPVTVSWNSGALTSGVHTFPAVLQSSGLYSLSSVV | |
| | TVPSSSLGTQTYICNVNHKPSNTKVDKKVEPKSCDKTHTCPPCPAPEA | |
| | AGGPSVFLFPPKPKDTLMISRTPEVTCVVVDVSHEDPEVKFNWYVDGV | |
| | EVHNAKTKPREEQYNSTYRVVSVLTVLHQDWLNGKEYKCKVSNKALAA | |
| | PIEKTISKAKGQPREPQVYTLPPSRDELTKNQVSLTCLVKGFYPSDIA | |
| | VEWESNGQPENNYKTTPPVLDSDGSFFLYSKLTVDKSRWQQGNVFSCS | |
| | VMHEALHNHYTQKSLSLSPGK | |
| Light Chain | DIVMTQTPLSLPVTPGEPASISCRSSQSIVHSNANTYLEWYLQKPGQS | 318 |
| | POLLIYKVSNRFSGVPDRFSGSGSGTDFTLKISRVEAEDVGVYYCFQG | |
| | SHVPWTFGQGTKVEIKRTVAAPSVFIFPPSDEQLKSGTASVVCLLNNF | |
| | YPREAKVQWKVDNALQSGNSQESVTEQDSKDSTYSLSSTLTLSKADYE | |
| | KHKVYACEVTHQGLSSPVTKSFNRGEC | |

P29342939

| | | |
|---|---|---|
| Heavy Chain | EVQLVESGGGLVQPGGSLRLSCAASGFDFSRYWMTWVRQAPGKGLEWV | 319 |
| | AEINPDSSTANYTPYLKDRFTISRDNAKNSLYLQMNSLRAEDTAVYYC | |
| | ARPVDGYYDAMDPWGQGTTVTVSSASTKGPSVFPLAPSSKSTSGGTAA | |
| | LGCLVKDYFPEPVTVSWNSGALTSGVHTFPAVLQSSGLYSLSSVVTVP | |
| | SSSLGTQTYICNVNHKPSNTKVDKKVEPKSCDKTHTCPPCPAPEAAGG | |
| | PSVFLFPPKPKDTLMISRTPEVTCVVVDVSHEDPEVKFNWYVDGVEVH | |
| | NAKTKPREEQYNSTYRVVSVLTVLHQDWLNGKEYKCKVSNKALAAPIE | |
| | KTISKAKGQPREPQVYTLPPSRDELTKNQVSLTCLVKGFYPSDIAVEW | |
| | ESNGQPENNYKTTPPVLDSDGSFFLYSKLTVDKSRWQQGNVFSCSVMH | |
| | EALHNHYTQKSLSLSPGK | |
| Light Chain | DIVMTQSPDSLAVSLGERATINCKSSQSLLNWYNQKNYLAWYQQKPGQ | 320 |
| | PPKLLIYGASTRESGVPDRFSGSGSGTDFTLTISSLQAEDVAVYYCON | |
| | DHQYPYTFGQGTKLEIKRTVAAPSVFIFPPSDEQLKSGTASVVCLLNN | |
| | FYPREAKVQWKVDNALQSGNSQESVTEQDSKDSTYSLSSTLTLSKADY | |
| | EKHKVYACEVTHQGLSSPVTKSFNRGEC | |

P29352939

| | | |
|---|---|---|
| Heavy Chain | EVQLVESGGGLVQPGGSLRLSCAASGFTFSRYWMTWVRQAPGKGLEWV | 321 |
| | AEINPDSSTANYTPYLKDRFTISRDNAKNSLYLQMNSLRAEDTAVYYC | |
| | ARPVDGYYDAMDPWGQGTTVTVSSASTKGPSVFPLAPSSKSTSGGTAA | |
| | LGCLVKDYFPEPVTVSWNSGALTSGVHTFPAVLQSSGLYSLSSVVTVP | |
| | SSSLGTQTYICNVNHKPSNTKVDKKVEPKSCDKTHTCPPCPAPEAAGG | |
| | PSVFLFPPKPKDTLMISRTPEVTCVVVDVSHEDPEVKFNWYVDGVEVH | |
| | NAKTKPREEQYNSTYRVVSVLTVLHQDWLNGKEYKCKVSNKALAAPIE | |
| | KTISKAKGQPREPQVYTLPPSRDELTKNQVSLTCLVKGFYPSDIAVEW | |
| | ESNGQPENNYKTTPPVLDSDGSFFLYSKLTVDKSRWQQGNVFSCSVMH | |
| | EALHNHYTQKSLSLSPGK | |
| Light Chain | DIVMTQSPDSLAVSLGERATINCKSSQSLLNWYNQKNYLAWYQQKPGQ | 322 |
| | PPKLLIYGASTRESGVPDRFSGSGSGTDFTLTISSLQAEDVAVYYCON | |
| | DHQYPYTFGQGTKLEIKRTVAAPSVFIFPPSDEQLKSGTASVVCLLNN | |
| | FYPREAKVQWKVDNALQSGNSQESVTEQDSKDSTYSLSSTLTLSKADY | |
| | EKHKVYACEVTHQGLSSPVTKSFNRGEC | |

P29362939

| | | |
|---|---|---|
| Heavy Chain | EVQLVESGGGLVQPGGSLRLSCAASGFTFSRYWMTWVRQAPGKGLEWI | 323 |
| | GEINPDSSTANYTPYLKDRFTISRDNAKNSLYLQMNSLRAEDTAVYYC | |
| | ARPVDGYYDAMDPWGQGTTVTVSSASTKGPSVFPLAPSSKSTSGGTAA | |
| | LGCLVKDYFPEPVTVSWNSGALTSGVHTFPAVLQSSGLYSLSSVVTVP | |
| | SSSLGTQTYICNVNHKPSNTKVDKKVEPKSCDKTHTCPPCPAPEAAGG | |
| | PSVFLFPPKPKDTLMISRTPEVTCVVVDVSHEDPEVKFNWYVDGVEVH | |
| | NAKTKPREEQYNSTYRVVSVLTVLHQDWLNGKEYKCKVSNKALAAPIE | |
| | KTISKAKGQPREPQVYTLPPSRDELTKNQVSLTCLVKGFYPSDIAVEW | |
| | ESNGQPENNYKTTPPVLDSDGSFFLYSKLTVDKSRWQQGNVFSCSVMH | |
| | EALHNHYTQKSLSLSPGK | |
| Light Chain | DIVMTQSPDSLAVSLGERATINCKSSQSLLNWYNQKNYLAWYQQKPGQ | 324 |
| | PPKLLIYGASTRESGVPDRFSGSGSGTDFTLTISSLQAEDVAVYYCON | |
| | DHQYPYTFGQGTKLEIKRTVAAPSVFIFPPSDEQLKSGTASVVCLLNN | |
| | FYPREAKVQWKVDNALQSGNSQESVTEQDSKDSTYSLSSTLTLSKADY | |
| | EKHKVYACEVTHQGLSSPVTKSFNRGEC | |

P29372939

| | | |
|---|---|---|
| Heavy Chain | EVQLVESGGGLVQPGGSLRLSCAASGFDFSRYWMTWVRQAPGKGLEWI | 325 |
| | GEINPDSSTANYTPYLKDRFTISRDNAKNSLYLQMNSLRAEDTAVYYC | |
| | ARPVDGYYDAMDPWGQGTTVTVSSASTKGPSVFPLAPSSKSTSGGTAA | |
| | LGCLVKDYFPEPVTVSWNSGALTSGVHTFPAVLQSSGLYSLSSVVTVP | |
| | SSSLGTQTYICNVNHKPSNTKVDKKVEPKSCDKTHTCPPCPAPEAAGG | |
| | PSVFLFPPKPKDTLMISRTPEVTCVVVDVSHEDPEVKFNWYVDGVEVH | |
| | NAKTKPREEQYNSTYRVVSVLTVLHQDWLNGKEYKCKVSNKALAAPIE | |
| | KTISKAKGQPREPQVYTLPPSRDELTKNQVSLTCLVKGFYPSDIAVEW | |
| | ESNGQPENNYKTTPPVLDSDGSFFLYSKLTVDKSRWQQGNVFSCSVMH | |
| | EALHNHYTQKSLSLSPGK | |
| Light Chain | DIVMTQSPDSLAVSLGERATINCKSSQSLLNWYNQKNYLAWYQQKPGQ | 326 |
| | PPKLLIYGASTRESGVPDRFSGSGSGTDFTLTISSLQAEDVAVYYCQN | |
| | DHQYPYTFGQGTKLEIKRTVAAPSVFIFPPSDEQLKSGTASVVCLLNN | |
| | FYPREAKVQWKVDNALQSGNSQESVTEQDSKDSTYSLSSTLTLSKADY | |
| | EKHKVYACEVTHQGLSSPVTKSFNRGEC | |

P29382939

| | | |
|---|---|---|
| Heavy Chain | EVQLVESGGGLVQPGGSLRLSCAASGFTFSRYWMTWVRQAPGKGLEWI | 327 |
| | GEINPDSSTANYTPYLKGRFTISRDNAKNSLYLQMNSLRAEDTAVYYC | |
| | ARPVDGYYDAMDPWGQGTTVTVSSASTKGPSVFPLAPSSKSTSGGTAA | |
| | LGCLVKDYFPEPVTVSWNSGALTSGVHTFPAVLQSSGLYSLSSVVTVP | |
| | SSSLGTQTYICNVNHKPSNTKVDKKVEPKSCDKTHTCPPCPAPEAAGG | |
| | PSVFLFPPKPKDTLMISRTPEVTCVVVDVSHEDPEVKFNWYVDGVEVH | |
| | NAKTKPREEQYNSTYRVVSVLTVLHQDWLNGKEYKCKVSNKALAAPIE | |
| | KTISKAKGQPREPQVYTLPPSRDELTKNQVSLTCLVKGFYPSDIAVEW | |
| | ESNGQPENNYKTTPPVLDSDGSFFLYSKLTVDKSRWQQGNVFSCSVMH | |
| | EALHNHYTQKSLSLSPGK | |
| Light Chain | DIVMTQSPDSLAVSLGERATINCKSSQSLLNWYNQKNYLAWYQQKPGQ | 328 |
| | PPKLLIYGASTRESGVPDRFSGSGSGTDFTLTISSLQAEDVAVYYCQN | |
| | DHQYPYTFGQGTKLEIKRTVAAPSVFIFPPSDEQLKSGTASVVCLLNN | |
| | FYPREAKVQWKVDNALQSGNSQESVTEQDSKDSTYSLSSTLTLSKADY | |
| | EKHKVYACEVTHQGLSSPVTKSFNRGEC | |

P30392939

| | | |
|---|---|---|
| Heavy Chain | EVQLVESGGGLVQPGGSLRLSCAASGFTFSRYWMTWVRQAPGKGLEWI | 329 |
| | GEINPDASTANYTPYLKGRFTISRDNAKNSLYLQMNSLRAEDTAVYYC | |
| | ARPVDGYYDAMDPWGQGTTVTVSSASTKGPSVFPLAPSSKSTSGGTAA | |
| | LGCLVKDYFPEPVTVSWNSGALTSGVHTFPAVLQSSGLYSLSSVVTVP | |
| | SSSLGTQTYICNVNHKPSNTKVDKKVEPKSCDKTHTCPPCPAPELLGG | |
| | PSVFLFPPKPKDTLMISRTPEVTCVVVDVSHEDPEVKFNWYVDGVEVH | |
| | NAKTKPREEQYNSTYRVVSVLTVLHQDWLNGKEYKCKVSNKALPAPIE | |
| | KTISKAKGQPREPQVYTLPPSRDELTKNQVSLTCLVKGFYPSDIAVEW | |
| | ESNGQPENNYKTTPPVLDSDGSFFLYSKLTVDKSRWQQGNVFSCSVMH | |
| | EALHNHYTQKSLSLSPGK | |
| Light Chain | DIVMTQSPDSLAVSLGERATINCKSSQSLLNWYNQKNYLAWYQQKPGQ | 330 |
| | PPKLLIYGASTRESGVPDRFSGSGSGTDFTLTISSLQAEDVAVYYCON | |
| | DHQYPYTFGQGTKLEIKRTVAAPSVFIFPPSDEQLKSGTASVVCLLNN | |
| | FYPREAKVQWKVDNALQSGNSQESVTEQDSKDSTYSLSSTLTLSKADY | |
| | EKHKVYACEVTHQGLSSPVTKSFNRGEC | |

P30402939

| | | |
|---|---|---|
| Heavy Chain | EVQLVESGGGLVQPGGSLRLSCAASGFTFSRYWMTWVRQAPGKGLEWI | 331 |
| | GEINPDSSTANYTPYLKGRFTISRDNAKNSLYLQMNSLRAEDTAVYYC | |
| | ARPVDAYYDAMDPWGQGTTVTVSSASTKGPSVFPLAPSSKSTSGGTAA | |
| | LGCLVKDYFPEPVTVSWNSGALTSGVHTFPAVLQSSGLYSLSSVVTVP | |
| | SSSLGTQTYICNVNHKPSNTKVDKKVEPKSCDKTHTCPPCPAPELLGG | |
| | PSVFLFPPKPKDTLMISRTPEVTCVVVDVSHEDPEVKFNWYVDGVEVH | |
| | NAKTKPREEQYNSTYRVVSVLTVLHQDWLNGKEYKCKVSNKALPAPIE | |
| | KTISKAKGQPREPQVYTLPPSRDELTKNQVSLTCLVKGFYPSDIAVEW | |
| | ESNGQPENNYKTTPPVLDSDGSFFLYSKLTVDKSRWQQGNVFSCSVMH | |
| | EALHNHYTQKSLSLSPGK | |
| Light Chain | DIVMTQSPDSLAVSLGERATINCKSSQSLLNWYNQKNYLAWYQQKPGQ | 332 |
| | PPKLLIYGASTRESGVPDRFSGSGSGTDFTLTISSLQAEDVAVYYCON | |
| | DHQYPYTFGQGTKLEIKRTVAAPSVFIFPPSDEQLKSGTASVVCLLNN | |
| | FYPREAKVQWKVDNALQSGNSQESVTEQDSKDSTYSLSSTLTLSKADY | |
| | EKHKVYACEVTHQGLSSPVTKSFNRGEC | |

P30412939

| | | |
|---|---|---|
| Heavy Chain | EVQLVESGGGLVQPGGSLRLSCAASGFTFSRYWMTWVRQAPGKGLEWI | 333 |
| | GEINPDASTANYTPYLKGRFTISRDNAKNSLYLQMNSLRAEDTAVYYC | |
| | ARPVDAYYDAMDPWGQGTTVTVSSASTKGPSVFPLAPSSKSTSGGTAA | |
| | LGCLVKDYFPEPVTVSWNSGALTSGVHTFPAVLQSSGLYSLSSVVTVP | |
| | SSSLGTQTYICNVNHKPSNTKVDKKVEPKSCDKTHTCPPCPAPELLGG | |
| | PSVFLFPPKPKDTLMISRTPEVTCVVVDVSHEDPEVKFNWYVDGVEVH | |
| | NAKTKPREEQYNSTYRVVSVLTVLHQDWLNGKEYKCKVSNKALPAPIE | |
| | KTISKAKGQPREPQVYTLPPSRDELTKNQVSLTCLVKGFYPSDIAVEW | |
| | ESNGQPENNYKTTPPVLDSDGSFFLYSKLTVDKSRWQQGNVFSCSVMH | |
| | EALHNHYTQKSLSLSPGK | |
| Light Chain | DIVMTQSPDSLAVSLGERATINCKSSQSLLNWYNQKNYLAWYQQKPGQ | 334 |
| | PPKLLIYGASTRESGVPDRFSGSGSGTDFTLTISSLQAEDVAVYYCON | |
| | DHQYPYTFGQGTKLEIKRTVAAPSVFIFPPSDEQLKSGTASVVCLLNN | |
| | FYPREAKVQWKVDNALQSGNSQESVTEQDSKDSTYSLSSTLTLSKADY | |
| | EKHKVYACEVTHQGLSSPVTKSFNRGEC | |

P30422939

| | | |
|---|---|---|
| Heavy Chain | EVQLVESGGGLVQPGGSLRLSCAASGFTFSRYWMTWVRQAPGKGLEWV | 335 |
| | AEINPDSSTANYTPYLKDRFTISRDNAKNSLYLQMNSLRAEDTAVYYC | |
| | ARPVDGYYDAMDYWGQGTTVTVSSASTKGPSVFPLAPSSKSTSGGTAA | |
| | LGCLVKDYFPEPVTVSWNSGALTSGVHTFPAVLQSSGLYSLSSVVTVP | |
| | SSSLGTQTYICNVNHKPSNTKVDKKVEPKSCDKTHTCPPCPAPELLGG | |
| | PSVFLFPPKPKDTLMISRTPEVTCVVVDVSHEDPEVKFNWYVDGVEVH | |
| | NAKTKPREEQYNSTYRVVSVLTVLHQDWLNGKEYKCKVSNKALPAPIE | |
| | KTISKAKGQPREPQVYTLPPSRDELTKNQVSLTCLVKGFYPSDIAVEW | |
| | ESNGQPENNYKTTPPVLDSDGSFFLYSKLTVDKSRWQQGNVFSCSVMH | |
| | EALHNHYTQKSLSLSPGK | |
| Light Chain | DIVMTQSPDSLAVSLGERATINCKSSQSLLNWYNQKNYLAWYQQKPGQ | 336 |
| | PPKLLIYGASTRESGVPDRFSGSGSGTDFTLTISSLQAEDVAVYYCON | |
| | DHQYPYTFGQGTKLEIKRTVAAPSVFIFPPSDEQLKSGTASVVCLLNN | |
| | FYPREAKVQWKVDNALQSGNSQESVTEQDSKDSTYSLSSTLTLSKADY | |
| | EKHKVYACEVTHQGLSSPVTKSFNRGEC | |

P30432939

| | | |
|---|---|---|
| Heavy Chain | EVQLVESGGGLVQPGGSLRLSCAASGFTFSRYWMTWVRQAPGKGLEWV | 337 |
| | AEINPDSSTANYTPYLKDRFTISRDNAKNSLYLQMNSLRAEDTAVYYC | |
| | ARPVDGYYDAMDNWGQGTTVTVSSASTKGPSVFPLAPSSKSTSGGTAA | |
| | LGCLVKDYFPEPVTVSWNSGALTSGVHTFPAVLQSSGLYSLSSVVTVP | |
| | SSSLGTQTYICNVNHKPSNTKVDKKVEPKSCDKTHTCPPCPAPELLGG | |
| | PSVFLFPPKPKDTLMISRTPEVTCVVVDVSHEDPEVKFNWYVDGVEVH | |
| | NAKTKPREEQYNSTYRVVSVLTVLHQDWLNGKEYKCKVSNKALPAPIE | |
| | KTISKAKGQPREPQVYTLPPSRDELTKNQVSLTCLVKGFYPSDIAVEW | |
| | ESNGQPENNYKTTPPVLDSDGSFFLYSKLTVDKSRWQQGNVFSCSVMH | |
| | EALHNHYTQKSLSLSPGK | |
| Light Chain | DIVMTQSPDSLAVSLGERATINCKSSQSLLNWYNQKNYLAWYQQKPGQ | 338 |
| | PPKLLIYGASTRESGVPDRFSGSGSGTDFTLTISSLQAEDVAVYYCON | |
| | DHQYPYTFGQGTKLEIKRTVAAPSVFIFPPSDEQLKSGTASVVCLLNN | |
| | FYPREAKVQWKVDNALQSGNSQESVTEQDSKDSTYSLSSTLTLSKADY | |
| | EKHKVYACEVTHQGLSSPVTKSFNRGEC | |

P30442939

| | | |
|---|---|---|
| Heavy Chain | EVQLVESGGGLVQPGGSLRLSCAASGFTFSRYWMTWVRQAPGKGLEWI | 339 |
| | GEINPDSSTANYTPYLKGRFTISRDNAKNSLYLQMNSLRAEDTAVYYC | |
| | ARPVDGYYDAMDYWGQGTTVTVSSASTKGPSVFPLAPSSKSTSGGTAA | |
| | LGCLVKDYFPEPVTVSWNSGALTSGVHTFPAVLQSSGLYSLSSVVTVP | |
| | SSSLGTQTYICNVNHKPSNTKVDKKVEPKSCDKTHTCPPCPAPELLGG | |
| | PSVFLFPPKPKDTLMISRTPEVTCVVVDVSHEDPEVKFNWYVDGVEVH | |
| | NAKTKPREEQYNSTYRVVSVLTVLHQDWLNGKEYKCKVSNKALPAPIE | |
| | KTISKAKGQPREPQVYTLPPSRDELTKNQVSLTCLVKGFYPSDIAVEW | |
| | ESNGQPENNYKTTPPVLDSDGSFFLYSKLTVDKSRWQQGNVFSCSVMH | |
| | EALHNHYTQKSLSLSPGK | |
| Light Chain | DIVMTQSPDSLAVSLGERATINCKSSQSLLNWYNQKNYLAWYQQKPGQ | 340 |
| | PPKLLIYGASTRESGVPDRFSGSGSGTDFTLTISSLQAEDVAVYYCQN | |
| | DHQYPYTFGQGTKLEIKRTVAAPSVFIFPPSDEQLKSGTASVVCLLNN | |
| | FYPREAKVQWKVDNALQSGNSQESVTEQDSKDSTYSLSSTLTLSKADY | |
| | EKHKVYACEVTHQGLSSPVTKSFNRGEC | |

P30452939

| | | |
|---|---|---|
| Heavy Chain | EVQLVESGGGLVQPGGSLRLSCAASGFTFSRYWMTWVRQAPGKGLEWI | 341 |
| | GEINPDSSTANYTPYLKGRFTISRDNAKNSLYLQMNSLRAEDTAVYYC | |
| | ARPVDGYYDAMDNWGQGTTVTVSSASTKGPSVFPLAPSSKSTSGGTAA | |
| | LGCLVKDYFPEPVTVSWNSGALTSGVHTFPAVLQSSGLYSLSSVVTVP | |
| | SSSLGTQTYICNVNHKPSNTKVDKKVEPKSCDKTHTCPPCPAPELLGG | |
| | PSVFLFPPKPKDTLMISRTPEVTCVVVDVSHEDPEVKFNWYVDGVEVH | |
| | NAKTKPREEQYNSTYRVVSVLTVLHQDWLNGKEYKCKVSNKALPAPIE | |
| | KTISKAKGQPREPQVYTLPPSRDELTKNQVSLTCLVKGFYPSDIAVEW | |
| | ESNGQPENNYKTTPPVLDSDGSFFLYSKLTVDKSRWQQGNVFSCSVMH | |
| | EALHNHYTQKSLSLSPGK | |
| Light Chain | DIVMTQSPDSLAVSLGERATINCKSSQSLLNWYNQKNYLAWYQQKPGQ | 342 |
| | PPKLLIYGASTRESGVPDRFSGSGSGTDFTLTISSLQAEDVAVYYCON | |
| | DHQYPYTFGQGTKLEIKRTVAAPSVFIFPPSDEQLKSGTASVVCLLNN | |
| | FYPREAKVQWKVDNALQSGNSQESVTEQDSKDSTYSLSSTLTLSKADY | |
| | EKHKVYACEVTHQGLSSPVTKSFNRGEC | |

P30393046

| | | |
|---|---|---|
| Heavy Chain | EVQLVESGGGLVQPGGSLRLSCAASGFTFSRYWMTWVRQAPGKGLEWI | 343 |
| | GEINPDASTANYTPYLKGRFTISRDNAKNSLYLQMNSLRAEDTAVYYC | |
| | ARPVDGYYDAMDPWGQGTTVTVSSASTKGPSVFPLAPSSKSTSGGTAA | |
| | LGCLVKDYFPEPVTVSWNSGALTSGVHTFPAVLQSSGLYSLSSVVTVP | |
| | SSSLGTQTYICNVNHKPSNTKVDKKVEPKSCDKTHTCPPCPAPELLGG | |
| | PSVFLFPPKPKDTLMISRTPEVTCVVVDVSHEDPEVKFNWYVDGVEVH | |
| | NAKTKPREEQYNSTYRVVSVLTVLHQDWLNGKEYKCKVSNKALPAPIE | |
| | KTISKAKGQPREPQVYTLPPSRDELTKNQVSLTCLVKGFYPSDIAVEW | |
| | ESNGQPENNYKTTPPVLDSDGSFFLYSKLTVDKSRWQQGNVFSCSVMH | |
| | EALHNHYTQKSLSLSPGK | |
| Light Chain | DIVMTQSPDSLAVSLGERATINCKSSQSLLNRYNQKNYLAWYQQKPGQ | 344 |
| | PPKLLIYGASTRESGVPDRFSGSGSGTDFTLTISSLQAEDVAVYYCQN | |
| | DHQYPYTFGQGTKLEIKRTVAAPSVFIFPPSDEQLKSGTASVVCLLNN | |
| | FYPREAKVQWKVDNALQSGNSQESVTEQDSKDSTYSLSSTLTLSKADY | |
| | EKHKVYACEVTHQGLSSPVTKSFNRGEC | |

P30403046

| | | |
|---|---|---|
| Heavy Chain | EVQLVESGGGLVQPGGSLRLSCAASGFTFSRYWMTWVRQAPGKGLEWI | 345 |
| | GEINPDSSTANYTPYLKGRFTISRDNAKNSLYLQMNSLRAEDTAVYYC | |
| | ARPVDAYYDAMDPWGQGTTVTVSSASTKGPSVFPLAPSSKSTSGGTAA | |
| | LGCLVKDYFPEPVTVSWNSGALTSGVHTFPAVLQSSGLYSLSSVVTVP | |
| | SSSLGTQTYICNVNHKPSNTKVDKKVEPKSCDKTHTCPPCPAPELLGG | |
| | PSVFLFPPKPKDTLMISRTPEVTCVVVDVSHEDPEVKFNWYVDGVEVH | |
| | NAKTKPREEQYNSTYRVVSVLTVLHQDWLNGKEYKCKVSNKALPAPIE | |
| | KTISKAKGQPREPQVYTLPPSRDELTKNQVSLTCLVKGFYPSDIAVEW | |
| | ESNGQPENNYKTTPPVLDSDGSFFLYSKLTVDKSRWQQGNVFSCSVMH | |
| | EALHNHYTQKSLSLSPGK | |
| Light Chain | DIVMTQSPDSLAVSLGERATINCKSSQSLLNRYNQKNYLAWYQQKPGQ | 346 |
| | PPKLLIYGASTRESGVPDRFSGSGSGTDFTLTISSLQAEDVAVYYCON | |
| | DHQYPYTFGQGTKLEIKRTVAAPSVFIFPPSDEQLKSGTASVVCLLNN | |
| | FYPREAKVQWKVDNALQSGNSQESVTEQDSKDSTYSLSSTLTLSKADY | |
| | EKHKVYACEVTHQGLSSPVTKSFNRGEC | |

P30413046

| | | |
|---|---|---|
| Heavy Chain | EVQLVESGGGLVQPGGSLRLSCAASGFTFSRYWMTWVRQAPGKGLEWI | 347 |
| | GEINPDASTANYTPYLKGRFTISRDNAKNSLYLQMNSLRAEDTAVYYC | |
| | ARPVDAYYDAMDPWGQGTTVTVSSASTKGPSVFPLAPSSKSTSGGTAA | |
| | LGCLVKDYFPEPVTVSWNSGALTSGVHTFPAVLQSSGLYSLSSVVTVP | |
| | SSSLGTQTYICNVNHKPSNTKVDKKVEPKSCDKTHTCPPCPAPELLGG | |
| | PSVFLFPPKPKDTLMISRTPEVTCVVVDVSHEDPEVKFNWYVDGVEVH | |
| | NAKTKPREEQYNSTYRVVSVLTVLHQDWLNGKEYKCKVSNKALPAPIE | |
| | KTISKAKGQPREPQVYTLPPSRDELTKNQVSLTCLVKGFYPSDIAVEW | |
| | ESNGQPENNYKTTPPVLDSDGSFFLYSKLTVDKSRWQQGNVFSCSVMH | |
| | EALHNHYTQKSLSLSPGK | |
| Light Chain | DIVMTQSPDSLAVSLGERATINCKSSQSLLNRYNQKNYLAWYQQKPGQ | 348 |
| | PPKLLIYGASTRESGVPDRFSGSGSGTDFTLTISSLQAEDVAVYYCON | |
| | DHQYPYTFGQGTKLEIKRTVAAPSVFIFPPSDEQLKSGTASVVCLLNN | |
| | FYPREAKVQWKVDNALQSGNSQESVTEQDSKDSTYSLSSTLTLSKADY | |
| | EKHKVYACEVTHQGLSSPVTKSFNRGEC | |

P30423046

| | | |
|---|---|---|
| Heavy Chain | EVQLVESGGGLVQPGGSLRLSCAASGFTFSRYWMTWVRQAPGKGLEWV | 349 |
| | AEINPDSSTANYTPYLKDRFTISRDNAKNSLYLQMNSLRAEDTAVYYC | |
| | ARPVDGYYDAMDYWGQGTTVTVSSASTKGPSVFPLAPSSKSTSGGTAA | |
| | LGCLVKDYFPEPVTVSWNSGALTSGVHTFPAVLQSSGLYSLSSVVTVP | |
| | SSSLGTQTYICNVNHKPSNTKVDKKVEPKSCDKTHTCPPCPAPELLGG | |
| | PSVFLFPPKPKDTLMISRTPEVTCVVVDVSHEDPEVKFNWYVDGVEVH | |
| | NAKTKPREEQYNSTYRVVSVLTVLHQDWLNGKEYKCKVSNKALPAPIE | |
| | KTISKAKGQPREPQVYTLPPSRDELTKNQVSLTCLVKGFYPSDIAVEW | |
| | ESNGQPENNYKTTPPVLDSDGSFFLYSKLTVDKSRWQQGNVFSCSVMH | |
| | EALHNHYTQKSLSLSPGK | |
| Light Chain | DIVMTQSPDSLAVSLGERATINCKSSQSLLNRYNQKNYLAWYQQKPGQ | 350 |
| | PPKLLIYGASTRESGVPDRFSGSGSGTDFTLTISSLQAEDVAVYYCON | |
| | DHQYPYTFGQGTKLEIKRTVAAPSVFIFPPSDEQLKSGTASVVCLLNN | |
| | FYPREAKVQWKVDNALQSGNSQESVTEQDSKDSTYSLSSTLTLSKADY | |
| | EKHKVYACEVTHQGLSSPVTKSFNRGEC | |

P30433046

| | | |
|---|---|---|
| Heavy Chain | EVQLVESGGGLVQPGGSLRLSCAASGFTFSRYWMTWVRQAPGKGLEWV | 351 |
| | AEINPDSSTANYTPYLKDRFTISRDNAKNSLYLQMNSLRAEDTAVYYC | |
| | ARPVDGYYDAMDNWGQGTTVTVSSASTKGPSVFPLAPSSKSTSGGTAA | |
| | LGCLVKDYFPEPVTVSWNSGALTSGVHTFPAVLQSSGLYSLSSVVTVP | |
| | SSSLGTQTYICNVNHKPSNTKVDKKVEPKSCDKTHTCPPCPAPELLGG | |
| | PSVFLFPPKPKDTLMISRTPEVTCVVVDVSHEDPEVKFNWYVDGVEVH | |
| | NAKTKPREEQYNSTYRVVSVLTVLHQDWLNGKEYKCKVSNKALPAPIE | |
| | KTISKAKGQPREPQVYTLPPSRDELTKNQVSLTCLVKGFYPSDIAVEW | |
| | ESNGQPENNYKTTPPVLDSDGSFFLYSKLTVDKSRWQQGNVFSCSVMH | |
| | EALHNHYTQKSLSLSPGK | |
| Light Chain | DIVMTQSPDSLAVSLGERATINCKSSQSLLNRYNQKNYLAWYQQKPGQ | 352 |
| | PPKLLIYGASTRESGVPDRFSGSGSGTDFTLTISSLQAEDVAVYYCON | |
| | DHQYPYTFGQGTKLEIKRTVAAPSVFIFPPSDEQLKSGTASVVCLLNN | |
| | FYPREAKVQWKVDNALQSGNSQESVTEQDSKDSTYSLSSTLTLSKADY | |
| | EKHKVYACEVTHQGLSSPVTKSFNRGEC | |

P30443046

| | | |
|---|---|---|
| Heavy Chain | EVQLVESGGGLVQPGGSLRLSCAASGFTFSRYWMTWVRQAPGKGLEWI | 353 |
| | GEINPDSSTANYTPYLKGRFTISRDNAKNSLYLQMNSLRAEDTAVYYC | |
| | ARPVDGYYDAMDYWGQGTTVTVSSASTKGPSVFPLAPSSKSTSGGTAA | |
| | LGCLVKDYFPEPVTVSWNSGALTSGVHTFPAVLQSSGLYSLSSVVTVP | |
| | SSSLGTQTYICNVNHKPSNTKVDKKVEPKSCDKTHTCPPCPAPELLGG | |
| | PSVFLFPPKPKDTLMISRTPEVTCVVVDVSHEDPEVKFNWYVDGVEVH | |
| | NAKTKPREEQYNSTYRVVSVLTVLHQDWLNGKEYKCKVSNKALPAPIE | |
| | KTISKAKGQPREPQVYTLPPSRDELTKNQVSLTCLVKGFYPSDIAVEW | |
| | ESNGQPENNYKTTPPVLDSDGSFFLYSKLTVDKSRWQQGNVFSCSVMH | |
| | EALHNHYTQKSLSLSPGK | |
| Light Chain | DIVMTQSPDSLAVSLGERATINCKSSQSLLNRYNQKNYLAWYQQKPGQ | 354 |
| | PPKLLIYGASTRESGVPDRFSGSGSGTDFTLTISSLQAEDVAVYYCON | |
| | DHQYPYTFGQGTKLEIKRTVAAPSVFIFPPSDEQLKSGTASVVCLLNN | |
| | FYPREAKVQWKVDNALQSGNSQESVTEQDSKDSTYSLSSTLTLSKADY | |
| | EKHKVYACEVTHQGLSSPVTKSFNRGEC | |

P30453046

| | | |
|---|---|---|
| Heavy Chain | EVQLVESGGGLVQPGGSLRLSCAASGFTFSRYWMTWVRQAPGKGLEWI | 355 |
| | GEINPDSSTANYTPYLKGRFTISRDNAKNSLYLQMNSLRAEDTAVYYC | |
| | ARPVDGYYDAMDNWGQGTTVTVSSASTKGPSVFPLAPSSKSTSGGTAA | |
| | LGCLVKDYFPEPVTVSWNSGALTSGVHTFPAVLQSSGLYSLSSVVTVP | |
| | SSSLGTQTYICNVNHKPSNTKVDKKVEPKSCDKTHTCPPCPAPELLGG | |
| | PSVFLFPPKPKDTLMISRTPEVTCVVVDVSHEDPEVKFNWYVDGVEVH | |
| | NAKTKPREEQYNSTYRVVSVLTVLHQDWLNGKEYKCKVSNKALPAPIE | |
| | KTISKAKGQPREPQVYTLPPSRDELTKNQVSLTCLVKGFYPSDIAVEW | |
| | ESNGQPENNYKTTPPVLDSDGSFFLYSKLTVDKSRWQQGNVFSCSVMH | |
| | EALHNHYTQKSLSLSPGK | |
| Light Chain | DIVMTQSPDSLAVSLGERATINCKSSQSLLNRYNQKNYLAWYQQKPGQ | 356 |
| | PPKLLIYGASTRESGVPDRFSGSGSGTDFTLTISSLQAEDVAVYYCON | |
| | DHQYPYTFGQGTKLEIKRTVAAPSVFIFPPSDEQLKSGTASVVCLLNN | |
| | FYPREAKVQWKVDNALQSGNSQESVTEQDSKDSTYSLSSTLTLSKADY | |
| | EKHKVYACEVTHQGLSSPVTKSFNRGEC | |

[0448] Thus, in certain embodiments, an antibody, or antigen-binding fragment thereof, specifically bind to a denatured human collagen polypeptide (selected, for example, from Table C1) and comprises a heavy chain and a corresponding light chain selected from Table A2. In certain embodiments, the heavy chain is at least 80, 85, 90, 95, 97, 98, 99, or 100% identical to a sequence selected from Table A2, including, for example, wherein the heavy chain has 1, 2, 3, 4, 5, or 6 alterations in one or more framework regions. In some embodiments, the light chain is at least 80, 85, 90, 95, 97, 98, 99, or 100% identical to a sequence selected from Table A2, including, for example, wherein the light chain has 1, 2, 3, 4, 5, or 6 alterations in one or more framework regions.

[0449] In some embodiments, the heavy chain and light chain sequences of an antibody or antigen-binding fragment are as follows:

[0450] the heavy chain comprises a sequence at least 80, 85, 90, 95, 97, 98, 99, or 100% identical to SEQ ID NO: 271, and the light chain comprises a sequence at least 80, 85, 90, 95, 97, 98, 99, or 100% identical to SEQ ID NO: 272;

[0451] the heavy chain comprises a sequence at least 80, 85, 90, 95, 97, 98, 99, or 100% identical to SEQ ID NO: 273, and the light chain comprises a sequence at least 80, 85, 90, 95, 97, 98, 99, or 100% identical to SEQ ID NO: 274;

[0452] the heavy chain comprises a sequence at least 80, 85, 90, 95, 97, 98, 99, or 100% identical to SEQ ID NO: 275, and the light chain comprises a sequence at least 80, 85, 90, 95, 97, 98, 99, or 100% identical to SEQ ID NO: 276;

[0453] the heavy chain comprises a sequence at least 80, 85, 90, 95, 97, 98, 99, or 100% identical to SEQ ID NO: 277, and the light chain comprises a sequence at least 80, 85, 90, 95, 97, 98, 99, or 100% identical to SEQ ID NO: 278;

[0454] the heavy chain comprises a sequence at least 80, 85, 90, 95, 97, 98, 99, or 100% identical to SEQ ID NO: 279, and the light chain comprises a sequence at least 80, 85, 90, 95, 97, 98, 99, or 100% identical to SEQ ID NO: 280;

[0455] the heavy chain comprises a sequence at least 80, 85, 90, 95, 97, 98, 99, or 100% identical to SEQ ID NO: 281, and the light chain comprises a sequence at least 80, 85, 90, 95, 97, 98, 99, or 100% identical to SEQ ID NO: 282;

[0456] the heavy chain comprises a sequence at least 80, 85, 90, 95, 97, 98, 99, or 100% identical to SEQ ID NO: 283, and the light chain comprises a sequence at least 80, 85, 90, 95, 97, 98, 99, or 100% identical to SEQ ID NO: 284;

[0457] the heavy chain comprises a sequence at least 80, 85, 90, 95, 97, 98, 99, or 100% identical to SEQ ID NO: 285, and the light chain comprises a sequence at least 80, 85, 90, 95, 97, 98, 99, or 100% identical to SEQ ID NO: 286;

[0458] the heavy chain comprises a sequence at least 80, 85, 90, 95, 97, 98, 99, or 100% identical to SEQ ID NO: 287, and the light chain comprises a sequence at least 80, 85, 90, 95, 97, 98, 99, or 100% identical to SEQ ID NO: 288;

[0459] the heavy chain comprises a sequence at least 80, 85, 90, 95, 97, 98, 99, or 100% identical to SEQ ID NO: 289, and the light chain comprises a sequence at least 80, 85, 90, 95, 97, 98, 99, or 100% identical to SEQ ID NO: 290;

[0460] the heavy chain comprises a sequence at least 80, 85, 90, 95, 97, 98, 99, or 100% identical to SEQ ID NO: 291, and the light chain comprises a sequence at least 80, 85, 90, 95, 97, 98, 99, or 100% identical to SEQ ID NO: 292;

[0461] the heavy chain comprises a sequence at least 80, 85, 90, 95, 97, 98, 99, or 100% identical to SEQ ID NO: 293, and the light chain comprises a sequence at least 80, 85, 90, 95, 97, 98, 99, or 100% identical to SEQ ID NO: 294;

[0462] the heavy chain comprises a sequence at least 80, 85, 90, 95, 97, 98, 99, or 100% identical to SEQ ID NO: 295, and the light chain comprises a sequence at least 80, 85, 90, 95, 97, 98, 99, or 100% identical to SEQ ID NO: 296;

[0463] the heavy chain comprises a sequence at least 80, 85, 90, 95, 97, 98, 99, or 100% identical to SEQ ID NO: 297, and the light chain comprises a sequence at least 80, 85, 90, 95, 97, 98, 99, or 100% identical to SEQ ID NO: 298;

[0464] the heavy chain comprises a sequence at least 80, 85, 90, 95, 97, 98, 99, or 100% identical to SEQ ID NO: 299, and the light chain comprises a sequence at least 80, 85, 90, 95, 97, 98, 99, or 100% identical to SEQ ID NO: 300;

[0465] the heavy chain comprises a sequence at least 80, 85, 90, 95, 97, 98, 99, or 100% identical to SEQ ID NO: 301, and the light chain comprises a sequence at least 80, 85, 90, 95, 97, 98, 99, or 100% identical to SEQ ID NO: 302;

[0466] the heavy chain comprises a sequence at least 80, 85, 90, 95, 97, 98, 99, or 100% identical to SEQ ID NO: 303, and the light chain comprises a sequence at least 80, 85, 90, 95, 97, 98, 99, or 100% identical to SEQ ID NO: 304;

[0467] the heavy chain comprises a sequence at least 80, 85, 90, 95, 97, 98, 99, or 100% identical to SEQ ID NO: 305, and the light chain comprises a sequence at least 80, 85, 90, 95, 97, 98, 99, or 100% identical to SEQ ID NO: 306;

[0468] the heavy chain comprises a sequence at least 80, 85, 90, 95, 97, 98, 99, or 100% identical to SEQ ID NO: 307, and the light chain comprises a sequence at least 80, 85, 90, 95, 97, 98, 99, or 100% identical to SEQ ID NO: 308;

[0469] the heavy chain comprises a sequence at least 80, 85, 90, 95, 97, 98, 99, or 100% identical to SEQ ID NO: 309, and the light chain comprises a sequence at least 80, 85, 90, 95, 97, 98, 99, or 100% identical to SEQ ID NO: 310;

[0470] the heavy chain comprises a sequence at least 80, 85, 90, 95, 97, 98, 99, or 100% identical to SEQ ID NO: 311, and the light chain comprises a sequence at least 80, 85, 90, 95, 97, 98, 99, or 100% identical to SEQ ID NO: 312;

[0471] the heavy chain comprises a sequence at least 80, 85, 90, 95, 97, 98, 99, or 100% identical to SEQ ID NO: 313, and the light chain comprises a sequence at least 80, 85, 90, 95, 97, 98, 99, or 100% identical to SEQ ID NO: 314;

[0472] the heavy chain comprises a sequence at least 80, 85, 90, 95, 97, 98, 99, or 100% identical to SEQ ID NO: 315, and the light chain comprises a sequence at least 80, 85, 90, 95, 97, 98, 99, or 100% identical to SEQ ID NO: 316;

[0473] the heavy chain comprises a sequence at least 80, 85, 90, 95, 97, 98, 99, or 100% identical to SEQ ID NO: 317, and the light chain comprises a sequence at least 80, 85, 90, 95, 97, 98, 99, or 100% identical to SEQ ID NO: 318;

[0474] the heavy chain comprises a sequence at least 80, 85, 90, 95, 97, 98, 99, or 100% identical to SEQ ID NO: 319, and the light chain comprises a sequence at least 80, 85, 90, 95, 97, 98, 99, or 100% identical to SEQ ID NO: 320;

[0475] the heavy chain comprises a sequence at least 80, 85, 90, 95, 97, 98, 99, or 100% identical to SEQ ID NO: 321, and the light chain comprises a sequence at least 80, 85, 90, 95, 97, 98, 99, or 100% identical to SEQ ID NO: 322;

[0476] the heavy chain comprises a sequence at least 80, 85, 90, 95, 97, 98, 99, or 100% identical to SEQ ID NO: 323, and the light chain comprises a sequence at least 80, 85, 90, 95, 97, 98, 99, or 100% identical to SEQ ID NO: 324;

[0477] the heavy chain comprises a sequence at least 80, 85, 90, 95, 97, 98, 99, or 100% identical to SEQ ID NO: 325, and the light chain comprises a sequence at least 80, 85, 90, 95, 97, 98, 99, or 100% identical to SEQ ID NO: 326;

[0478] the heavy chain comprises a sequence at least 80, 85, 90, 95, 97, 98, 99, or 100% identical to SEQ ID NO: 327, and the light chain comprises a sequence at least 80, 85, 90, 95, 97, 98, 99, or 100% identical to SEQ ID NO: 328;

[0479] the heavy chain comprises a sequence at least 80, 85, 90, 95, 97, 98, 99, or 100% identical to SEQ ID NO: 329, and the light chain comprises a sequence at least 80, 85, 90, 95, 97, 98, 99, or 100% identical to SEQ ID NO: 330;

[0480] the heavy chain comprises a sequence at least 80, 85, 90, 95, 97, 98, 99, or 100% identical to SEQ ID NO: 331, and the light chain comprises a sequence at least 80, 85, 90, 95, 97, 98, 99, or 100% identical to SEQ ID NO: 332;

[0481] the heavy chain comprises a sequence at least 80, 85, 90, 95, 97, 98, 99, or 100% identical to SEQ ID NO: 333, and the light chain comprises a sequence at least 80, 85, 90, 95, 97, 98, 99, or 100% identical to SEQ ID NO: 334;

[0482] the heavy chain comprises a sequence at least 80, 85, 90, 95, 97, 98, 99, or 100% identical to SEQ ID NO: 335, and the light chain comprises a sequence at least 80, 85, 90, 95, 97, 98, 99, or 100% identical to SEQ ID NO: 336;

[0483] the heavy chain comprises a sequence at least 80, 85, 90, 95, 97, 98, 99, or 100% identical to SEQ ID NO: 337, and the light chain comprises a sequence at least 80, 85, 90, 95, 97, 98, 99, or 100% identical to SEQ ID NO: 338;

[0484] the heavy chain comprises a sequence at least 80, 85, 90, 95, 97, 98, 99, or 100% identical to SEQ ID NO: 339, and the light chain comprises a sequence at least 80, 85, 90, 95, 97, 98, 99, or 100% identical to SEQ ID NO: 340;

[0485] the heavy chain comprises a sequence at least 80, 85, 90, 95, 97, 98, 99, or 100% identical to SEQ ID NO: 341, and the light chain comprises a sequence at least 80, 85, 90, 95, 97, 98, 99, or 100% identical to SEQ ID NO: 342;

[0486] the heavy chain comprises a sequence at least 80, 85, 90, 95, 97, 98, 99, or 100% identical to SEQ ID NO: 343, and the light chain comprises a sequence at least 80, 85, 90, 95, 97, 98, 99, or 100% identical to SEQ ID NO: 344;

[0487] the heavy chain comprises a sequence at least 80, 85, 90, 95, 97, 98, 99, or 100% identical to SEQ ID NO: 345, and the light chain comprises a sequence at least 80, 85, 90, 95, 97, 98, 99, or 100% identical to SEQ ID NO: 346; or

[0488] the heavy chain comprises a sequence at least 80, 85, 90, 95, 97, 98, 99, or 100% identical to SEQ ID NO: 347, and the light chain comprises a sequence at least 80, 85, 90, 95, 97, 98, 99, or 100% identical to SEQ ID NO: 348;

[0489] the heavy chain comprises a sequence at least 80, 85, 90, 95, 97, 98, 99, or 100% identical to SEQ ID NO: 349, and the light chain comprises a sequence at least 80, 85, 90, 95, 97, 98, 99, or 100% identical to SEQ ID NO: 350;

[0490] the heavy chain comprises a sequence at least 80, 85, 90, 95, 97, 98, 99, or 100% identical to SEQ ID NO: 351, and the light chain comprises a sequence at least 80, 85, 90, 95, 97, 98, 99, or 100% identical to SEQ ID NO: 352;

[0491] the heavy chain comprises a sequence at least 80, 85, 90, 95, 97, 98, 99, or 100% identical to SEQ ID NO: 353, and the light chain comprises a sequence at least 80, 85, 90, 95, 97, 98, 99, or 100% identical to SEQ ID NO: 354; or

[0492] the heavy chain comprises a sequence at least 80, 85, 90, 95, 97, 98, 99, or 100% identical to SEQ ID NO: 355, and the light chain comprises a sequence at least 80, 85, 90, 95, 97, 98, 99, or 100% identical to SEQ ID NO: 356.

[0493] Also included are variants thereof, for example, variants having 1, 2, 3, 4, 5, 6, 7, 8, 9, or 10 alterations in one or more framework regions. Exemplary “alterations” include amino acid substitutions, additions, and deletions.

[0494] In some embodiments, an antibody, or antigen-binding fragment thereof, comprises, consists, or consists essentially of a V_{H} region and/or a V_{L} region characterized by a combination of V_{H}CDR1, V_{H}CDR2, V_{H}CDR3, V_{L}CDR1, V_{L}CDR2, and V_{L}CDR3 sequences, and framework region (FR) sequences, including heavy chain framework HFR1, HFR2, HFR2, and HFR4 sequences, and light chain LFR1, LFR2, LFR3, and LFR4 sequences. Table A3 provides a summary of the foregoing sequences.

TABLE A3
Exemplary CDR and Framework Regions

| | | |
|---|---|---|
| | | SEQ |
| | | ID |
| Description | Sequence | NO: |

HU177 Derived Sequences

| | | |
|---|---|---|
| HFR1 | QVTLKESGPALVKPTQTLTLTCTFSGFSLS | 357 |
| HFR1 | EVQLVESGGGLVQPGGSLRLSCAASGFTFS | 358 |
| HFR1 | EVQLVESGGGLVQPGGSLRLSCAASGFSFS | 359 |
| HFR1 | EVQLVESGGGLVQPGGSLRLSCAASGFTLS | 360 |
| HFR1 | EVQLVESGGGLVQPGGSLRLSCAASGFSLS | 361 |
| HFR2 | WIRQPPGKALEWLA | 362 |
| HFR2 | WVRQAPGKGLEWVA | 363 |
| HFR2 | WIRQAPGKGLEWVA | 364 |
| HFR2 | WVRQAPGKGLEWLA | 365 |
| HFR2 | WIRQAPGKGLEWLA | 366 |
| HFR3 | RLTISKDTSKNQVVLTMTNMDPVDTATYYCAR | 367 |
| HFR3 | RLTISRDNAKNSLYLQMNSLRAEDTAVYYCAR | 368 |
| HFR3 | RLTISKDNAKNSLYLQMNSLRAEDTAVYYCAR | 369 |
| HFR4 | WGQGTTVTVSS | 370 |
| VHCDR1 | TSGMGVG | 371 |
| VHCDR1 | TPGMGVW | 372 |
| VHCDR2 | DIWWDDNKYANPSLKS | 373 |
| VHCDR2 | DIWWDDNKYTNPSLKS | 374 |
| VHCDR3 | RANYGNPYYAQDY | 375 |
| LFR1 | DIVMTQTPLSLPVTPGEPASISC | 376 |
| LFR2 | WYLQKPGQSPQLLIY | 377 |
| LFR3 | GVPDRFSGSGSGTDFTLKISRVEAEDVGVYYC | 378 |
| LFR4 | FGQGTKVEIK | 379 |
| VLCDR1 | RSSQSIVHSNGNTYLE | 380 |
| VLCDR1 | RSSQSIVHSQGNTYLE | 381 |
| VLCDR1 | RSSQSIVHSSGNTYLE | 382 |
| VLCDR1 | RSSQSIVHSNANTYLE | 383 |
| VLCDR1 | RSSQSIVHSWGNTYLE | 384 |
| VLCDR1 | RSSQSIVHSWGNTYFE | 385 |
| VLCDR2 | KVSNRFS | 386 |
| VLCDR3 | FQGSHVPWT | 387 |
| VLCDR3 | FQGSHFPWT | 388 |

HUIV26 Derived Sequences

| | | |
|---|---|---|
| HFR1 | EVQLVESGGGLVQPGGSLRLSCAASGFTFS | 389 |
| HFR1 | EVQLVESGGGLVQPGGSLRLSCAASGFDFS | 390 |
| HFR2 | WVRQAPGKGLEWVA | 391 |
| HFR2 | WVRQAPGKGLEWIG | 392 |
| HFR3 | RFTISRDNAKNSLYLQMNSLRAEDTAVYYCAR | 393 |
| HFR4 | WGQGTTVTVSS | 394 |
| VHCDR1 | RYWMS | 395 |
| VHCDR1 | RYWMA | 396 |
| VHCDR1 | RYWMT | 397 |
| VHCDR2 | EINPDSSTANYTPALKG | 398 |
| VHCDR2 | EINPDSSTANYTPSLKG | 399 |
| VHCDR2 | EINPDSSTANYTPYLKG | 400 |
| VHCDR2 | EINPDASTANYTPYLKG | 401 |
| VHCDR3 | PVDGYYDAMDP | 402 |
| VHCDR3 | PVDAYYDAMDP | 403 |
| VHCDR3 | PVDAYYDAMDP | 404 |
| VHCDR3 | PVDGYYDAMDN | 405 |
| LFR1 | DIVMTQSPDSLAVSLGERATINC | 406 |
| LFR2 | WYQQKPGQPPKLLIY | 407 |
| LFR3 | GVPDRFSGSGSGTDFTLTISSLQAEDVAVYYC | 408 |
| LFR4 | FGQGTKLEIK | 409 |
| VLCDR1 | KSSQSLLNWHNQKNYLA | 410 |
| VLCDR1 | KSSQSLLNWYNQKNYLA | 411 |
| VLCDR1 | KSSQSLLNRYNQKNYLA | 412 |
| VLCDR2 | GASTRES | 413 |
| VLCDR3 | QNDHQYPYT | 414 |

[0495] Thus, in certain embodiments, an antibody, or antigen-binding fragment thereof, comprises, consists, or consists essentially of a V_{H} region or heavy chain comprising:

[0496] an HFR1 sequence selected from SEQ ID NOs: 357-361;

[0497] an HFR2 sequence selected from SEQ ID NOs: 362-366;

[0498] an HFR3 sequence selected from SEQ ID NOs: 367-369;

[0499] an HFR4 sequence set forth in SEQ ID NO: 370;

[0500] a V_{H}CDR1 sequence selected from SEQ ID NOs: 371-372;

[0501] a V_{H}CDR2 sequence selected from SEQ ID NOs: 373-374; and

[0502] a V_{H}CDR3 sequence selected from SEQ ID NO: 375,

[0503] and/or a V_{L} region or light chain comprising:

[0504] an LFR1 sequence set forth in SEQ ID NO: 376;

[0505] an LFR2 sequence set forth in SEQ ID NO: 377;

[0506] an LFR3 sequence set forth in SEQ ID NO: 378;

[0507] an LFR4 sequence set forth in SEQ ID NO: 379;

[0508] a V_{L}CDR1 sequence selected from SEQ ID NOs: 380-385;

[0509] a V_{L}CDR2 sequence set forth in SEQ ID NO: 386; and

[0510] a V_{L}CDR3 sequence selected from SEQ ID NOs: 387-388,

[0511] wherein the antibody, or antigen-binding fragment thereof, specifically binds to a human denatured collagen, as described herein.

[0512] In some embodiments, an antibody, or antigen-binding fragment thereof, comprises, consists, or consists essentially of a V_{H} region or heavy chain comprising:

[0513] an HFR1 sequence selected from SEQ ID NOs: 389-390;

[0514] an HFR2 sequence selected from SEQ ID NOs: 391-392;

[0515] an HFR3 sequence set forth in SEQ ID NO: 393;

[0516] an HFR4 sequence set forth in SEQ ID NO: 394;

[0517] a V_{H}CDR1 sequence selected from SEQ ID NOs: 395-397;

[0518] a V_{H}CDR2 sequence selected from SEQ ID NOs: 398-401; and

[0519] a V_{H}CDR3 sequence selected from SEQ ID NOs: 402-405,

[0520] and/or a VL region or light chain comprising:

[0521] an LFR1 sequence set forth in SEQ ID NO: 406;

[0522] an LFR2 sequence set forth in SEQ ID NO: 407;

[0523] an LFR3 sequence set forth in SEQ ID NO: 408;

[0524] an LFR4 sequence set forth in SEQ ID NO: 409;

[0525] a V_{L}CDR1 sequence selected from SEQ ID NOs: 410-412;

[0526] a V_{L}CDR2 set forth in SEQ ID NO: 413; and

[0527] a V_{L}CDR3 set forth in SEQ ID NO: 414,

[0528] wherein the antibody, or antigen-binding fragment thereof, specifically binds to a human denatured collagen, as described herein.

[0529] In certain embodiments, an antibody, or antigen-binding fragment thereof, specifically binds to human denatured collagen with a binding affinity of about 10 pM to about 500 pM or to about 1 nM, or about, at least about, or no more than about 10, 20, 30, 40, 50, 60, 70, 80, 90, 100, 110, 120, 130, 140, 150, 160, 170, 180, 190, 200, 300, 400, 500, 600, 700, 800, 900 pM, or 1 nM, or optionally with an affinity that ranges from about 10 pM to about 500 pM, about 10 pM to about 400 pM, about 10 pM to about 300 pM, about 10 pM to about 200 pM, about 10 pM to about 100 pM, about 10 pM to about 50 pM, or about 20 pM to about 500 pM, about 20 pM to about 400 pM, about 20 pM to about 300 pM, about 20 pM to about 200 pM, about 20 pM to about 100 pM, about 20 pM to about 50 pM, or about 30 pM to about 500 pM, about 30 pM to about 400 pM, about 30 pM to about 300 pM, about 30 pM to about 200 pM, about 30 pM to about 100 pM, about 30 pM to about 50 pM, or about 20 pM to about 200 pM, about 30 pM to about 300 pM, about 40 pM to about 400 pM, about 50 pM to about 500 pM, about 60 pM to about 600 pM, about 70 pM to about 700 pM, about 80 pM to about 800 pM, about 90 pM to about 900 pM, or about 100 pM to about 1 nM.

[0530] In certain embodiments, an antibody, or antigen-binding fragment thereof, specifically binds to a human denatured collagen polypeptide (see Table C1) with a binding affinity that is about or at least about 1.5, 2, 3, 4, 5, 6, 7, 8, 9, 10, 15, 20, 30, 40, 50, 60, 70, 80, 90, or 100-fold stronger that its binding affinity for a corresponding native human collagen polypeptide.

[0531] In certain embodiments, variant antibodies or antigen-binding fragments, or V_{H}, V_{L}, or CDR regions thereof, specifically bind to denatured human collagen at least about 50%, at least about 70%, and in certain embodiments, at least about 90% as well as an antibody sequence specifically set forth herein. In further embodiments, such variant antibodies or antigen-binding fragments, or V_{H}, V_{L}, or CDR regions thereof, bind to denatured human collagen with greater affinity than the antibodies described herein, for example, that bind quantitatively at least about 105%, 106%, 107%, 108%, 109%, or 110% as well as an antibody sequence specifically set forth herein.

[0532] Determination of the three-dimensional structures of representative polypeptides (e.g., variant antibody or an antigen-binding fragment thereof) may be made through routine methodologies such that substitution, addition, deletion or insertion of one or more amino acids with selected natural or non-natural amino acids can be virtually modeled for purposes of determining whether a so derived structural variant retains the space-filling properties of presently disclosed species. See, for instance, Donate et al., 1994 Prot. Sci. 3:2378; Bradley et al., Science 309: 1868-1871 (2005); Schueler-Furman et al., Science 310:638 (2005); Dietz et al., Proc. Nat. Acad. Sci. USA 103:1244 (2006); Dodson et al., Nature 450:176 (2007); Qian et al., Nature 450:259 (2007); Raman et al. Science 327:1014-1018 (2010). Some additional non-limiting examples of computer algorithms that may be used for these and related embodiments, such as for rational design of antibodies, and antigen-binding domains thereof, as provided herein, include VMD which is a molecular visualization program for displaying, animating, and analyzing large biomolecular systems using 3-D graphics and built-in scripting (see the website for the Theoretical and Computational Biophysics Group, University of Illinois at Urbana-Champagne, at ks.uiuc.edu/Research/vmd/. Many other computer programs are known in the art and available to the skilled person and which allow for determining atomic dimensions from space-filling models (van der Waals radii) of energy-minimized conformations; GRID, which seeks to determine regions of high affinity for different chemical groups, thereby enhancing binding, Monte Carlo searches, which calculate mathematical alignment, and CHARMM (Brooks et al. (1983) J. Comput. Chem. 4:187-217) and AMBER (Weiner et al (1981) J. Comput. Chem. 106: 765), which assess force field calculations, and analysis (see also, Eisenfield et al. (1991) Am. J. Physiol. 261:C376-386; Lybrand (1991) J. Pharm. Belg. 46:49-54; Froimowitz (1990) Biotechniques 8:640-644; Burbam et al. (1990) Proteins 7:99-111; Pedersen (1985) Environ. Health Perspect. 61:185-190; and Kini et al. (1991) J. Biomol. Struct. Dyn. 9:475-488). A variety of appropriate computational computer programs are also commercially available, such as from Schrödinger (Munich, Germany).

[0533] In some embodiments, an antibody, or antigen-binding fragment thereof, comprises an Fc region, for example, an Fc region selected from an IgA Fc region (including subclasses IgA1 and IgA2), an IgD Fc region, an IgE Fc region, an IgG Fc region (including subclasses IgG1, IgG2, IgG3, and IgG4), and an IgM Fc region. In some instances, the Fc region is a human Fc region. In some embodiments, an Fc region has high effector function in humans, for example, an IgG1 Fc region or an IgG3 Fc region. In some embodiments, an Fc region has low effector function in humans, for example, an IgG2 Fc region or an IgG4 Fc region.

[0534] The Fc region of an antibody interacts with a number of Fc receptors and ligands, imparting an array of important functional capabilities referred to as effector functions. For IgG, the Fc region comprises Ig domains CH2 and CH3 and the N-terminal hinge leading into CH2. One family of Fc receptors for the IgG class are the Fc gamma receptors (FcγRs). These receptors mediate communication between antibodies and the cellular arm of the immune system (Raghavan et al., 1996, Annu Rev Cell Dev Biol 12:181-220; Ravetch et al., 2001, Annu Rev Immunol 19:275-290). In humans this protein family includes FcγRI (CD64), including isoforms FcγRIa, FcγRIb, and FcγRIc; FcγRII (CD32), including isoforms FcγRIIa (including allotypes H131 and R131), FcγRIIb (including FcγRIIb-1 and FcγRIlb-2), and FcγRIIc; and FcγRIII (CD16), including isoforms FcγRIIIa (including allotypes V158 and F158) and FcγRIIIb (including allotypes FcγRIIIb-NA1 and FcγRIIIb-NA2) (Jefferis et al., 2002, Immunol Lett 82:57-65). These receptors typically have an extracellular domain that mediates binding to Fc, a membrane spanning region, and an intracellular domain that may mediate some signaling event within the cell. These receptors are expressed in a variety of immune cells including monocytes, macrophages, neutrophils, dendritic cells, eosinophils, mast cells, platelets, B cells, large granular lymphocytes, Langerhans' cells, natural killer (NK) cells, and T cells. Formation of the Fc/FcγR complex recruits these effector cells to sites of bound antigen, typically resulting in signaling events within the cells and important subsequent immune responses such as release of inflammation mediators, B cell activation, endocytosis, phagocytosis, and cytotoxic attack.

[0535] The ability to mediate cytotoxic and phagocytic effector functions is a potential mechanism by which antibodies destroy targeted cells. The cell-mediated reaction wherein nonspecific cytotoxic cells that express FcγRs recognize bound antibody on a target cell and subsequently cause lysis of the target cell is referred to as antibody dependent cell-mediated cytotoxicity (ADCC) (Raghavan et al., 1996, Annu Rev Cell Dev Biol 12:181-220; Ghetie et al., 2000, Annu Rev Immunol 18:739-766; Ravetch et al., 2001, Annu Rev Immunol 19:275-290). The cell-mediated reaction wherein nonspecific cytotoxic cells that express FcγRs recognize bound antibody on a target cell and subsequently cause phagocytosis of the target cell is referred to as antibody dependent cell-mediated phagocytosis (ADCP). All FcγRs bind the same region on Fc, at the N-terminal end of the Cg2 (CH2) domain and the preceding hinge. This interaction is well characterized structurally (Sondermann et al., 2001, J Mol Biol 309:737-749), and several structures of the human Fc bound to the extracellular domain of human FcγRIIIb have been solved (pdb accession code 1E4K) (Sondermann et al., 2000, Nature 406:267-273.) (pdb accession codes 1IIS and IIIX) (Radaev et al., 2001, J Biol Chem 276:16469-16477.)

[0536] The Fc region is also involved in activation of the complement cascade. In the classical complement pathway, C1 binds with its C1q subunits to Fc fragments of IgG or IgM, which has formed a complex with antigen(s). In certain embodiments, modifications to the Fc region comprise modifications that alter (either enhance or decrease) the ability of an antibody, or antigen-binding fragment thereof, as described herein to activate the complement system (see e.g., U.S. Pat. No. 7,740,847). To assess complement activation, a complement-dependent cytotoxicity (CDC) assay may be performed (See, e.g., Gazzano-Santoro et al., J. Immunol. Methods, 202:163 (1996)).

[0537] In some embodiments, an antibody, or antigen-binding fragment thereof, comprises a modified Fc region, including Fc regions having altered properties or biological activities relative to wild-type Fc region(s). In particular embodiments, a modified Fc region has at least one altered effector function and/or pharmacokinetic (PK) characteristic relative to a wild-type Fc region. Thus in certain embodiments, an antibody, or antigen-binding fragment thereof, has a modified Fc region with altered functional properties, such as reduced or enhanced CDC, ADCC, or ADCP activity, reduced or enhanced binding affinity for a specific FcγR, or increased serum half-life.

[0538] Examples of modified Fc regions include those having mutated sequences, for instance, by substitution, insertion, deletion, or truncation of one or more amino acids relative to a wild-type sequence, hybrid Fc polypeptides composed of domains from different immunoglobulin classes/subclasses, Fc polypeptides having altered glycosylation/sialylation patterns, and Fc polypeptides that are modified or derivatized, for example, by biotinylation (see, e.g., US Application No. 2010/0209424), phosphorylation, sulfation, etc., or any combination of the foregoing. Such modifications can be employed to alter (e.g., increase, decrease) the binding properties of the Fc region to one or more particular FcRs (e.g., FcγRI, FcγRIIa, FcγRIIb, FcγRIIc, FcγRIIIa, FcγRIIIb, FcRn), its pharmacokinetic properties (e.g., stability or half-life, bioavailability, tissue distribution, volume of distribution, concentration, elimination rate constant, elimination rate, area under the curve (AUC), clearance, Cmax, tmax, Cmin, fluctuation), its immunogenicity, its complement fixation or activation, and/or the CDC/ADCC/ADCP-related activities of the Fc region, among other properties described herein, relative to a corresponding wild-type Fc sequence of an antibody or antigen-binding fragment thereof. Included are modified Fc regions of human and/or mouse origin.

[0539] Certain embodiments include antibodies, or antigen-binding fragments thereof, which comprise hybrid Fc regions, for example, Fc regions that comprise a combination of Fc domains (e.g., hinge, CH2, CH3, CH4) from immunoglobulins of different species (e.g., human, mouse), different Ig classes, and/or different Ig subclasses. General examples include hybrid Fc regions that comprise, consist of, or consist essentially of the following combination of CH2/CH3 domains: IgA1/IgA1, IgA1/IgA2, IgA1/IgD, IgA1/IgE, IgA1/IgG1, IgA1/IgG2, IgA1/IgG3, IgA1/IgG4, IgA1/IgM, IgA2/IgA1, IgA2/IgA2, IgA2/IgD, IgA2/IgE, IgA2/IgG1, IgA2/IgG2, IgA2/IgG3, IgA2/IgG4, IgA2/IgM, IgD/IgA1, IgD/IgA2, IgD/IgD, IgD/IgE, IgD/IgG1, IgD/IgG2, IgD/IgG3, IgD/IgG4, IgD/IgM, IgE/IgA1, IgE/IgA2, IgE/IgD, IgE/IgE, IgE/IgG1, IgE/IgG2, IgE/IgG3, IgE/IgG4, IgE/IgM, IgG1/IgA1, IgG1/IgA2, IgG1/IgD, IgG1/IgE, IgG1/IgG1, IgG1/IgG2, IgG1/IgG3, IgG1/IgG4, IgG1/IgM, IgG2/IgA1, IgG2/IgA2, IgG2/IgD, IgG2/IgE, IgG2/IgG1, IgG2/IgG2, IgG2/IgG3, IgG2/IgG4, IgG2/IgM, IgG3/IgA1, IgG3/IgA2, IgG3/IgD, IgG3/IgE, IgG3/IgG1, IgG3/IgG2, IgG3/IgG3, IgG3/IgG4, IgG3/IgM, IgG4/IgA1, IgG4/IgA2, IgG4/IgD, IgG4/IgE, IgG4/IgG1, IgG4/IgG2, IgG4/IgG3, IgG4/IgG4, IgG4/IgM, IgM/IgA1, IgM/IgA2, IgM/IgD, IgM/IgE, IgM/IgG1, IgM/IgG2, IgM/IgG3, IgM/IgG4, IgM/IgM (or fragments or variants thereof), and optionally include a hinge from one or more of IgA1, IgA2, IgD, IgG1, IgG2, IgG3, or IgG4, and/or a CH4 domain from IgE and/or IgM. In specific embodiments, the hinge, CH2, CH3, and CH4 domains are from human Ig.

[0540] Additional examples include hybrid Fc regions that comprise, consist of, or consist essentially of the following combination of CH2/CH4 domains: IgA1/IgE, IgA2/IgE, IgD/IgE, IgE/IgE, IgG1/IgE, IgG2/IgE, IgG3/IgE, IgG4/IgE, IgM/IgE, IgA1/IgM, IgA2/IgM, IgD/IgM, IgE/IgM, IgG1/IgM, IgG2/IgM, IgG3/IgM, IgG4/IgM, IgM/IgM (or fragments or variants thereof), and optionally include a hinge from one or more of IgA1, IgA2, IgD, IgG1, IgG2, IgG3, IgG4, and/or a CH3 domain from one or more of IgA1, IgA2, IgD, IgE, IgG1, IgG2, IgG3, IgG4, or IgM. In specific embodiments, the hinge, CH2, CH3, and CH4 domains are from human Ig.

[0541] Certain examples include hybrid Fc regions that comprise, consist of, or consist essentially of the following combination of CH3/CH4 domains: IgA1/IgE, IgA2/IgE, IgD/IgE, IgE/IgE, IgG1/IgE, IgG2/IgE, IgG3/IgE, IgG4/IgE, IgM/IgE, IgA1/IgM, IgA2/IgM, IgD/IgM, IgE/IgM, IgG1/IgM, IgG2/IgM, IgG3/IgM, IgG4/IgM, IgM/IgM (or fragments or variants thereof), and optionally include a hinge from one or more of IgA1, IgA2, IgD, IgG1, IgG2, IgG3, IgG4, and/or a CH2 domain from one or more of IgA1, IgA2, IgD, IgE, IgG1, IgG2, IgG3, IgG4, or IgM. In specific embodiments, the hinge, CH2, CH3, and CH4 domains are from human Ig.

[0542] Particular examples include hybrid Fc regions that comprise, consist of, or consist essentially of the following combination of hinge/CH2 domains: IgA1/IgA1, IgA1/IgA2, IgA1/IgD, IgA1/IgE, IgA1/IgG1, IgA1/IgG2, IgA1/IgG3, IgA1/IgG4, IgA1/IgM, IgA2/IgA1, IgA2/IgA2, IgA2/IgD, IgA2/IgE, IgA2/IgG1, IgA2/IgG2, IgA2/IgG3, IgA2/IgG4, IgA2/IgM, IgD/IgA1, IgD/IgA2, IgD/IgD, IgD/IgE, IgD/IgG1, IgD/IgG2, IgD/IgG3, IgD/IgG4, IgD/IgM, IgG1/IgA1, IgG1/IgA2, IgG1/IgD, IgG1/IgE, IgG1/IgG1, IgG1/IgG2, IgG1/IgG3, IgG1/IgG4, IgG1/IgM, IgG2/IgA1, IgG2/IgA2, IgG2/IgD, IgG2/IgE, IgG2/IgG1, IgG2/IgG2, IgG2/IgG3, IgG2/IgG4, IgG2/IgM, IgG3/IgA1, IgG3/IgA2, IgG3/IgD, IgG3/IgE, IgG3/IgG1, IgG3/IgG2, IgG3/IgG3, IgG3/IgG4, IgG3/IgM, IgG4/IgA1, IgG4/IgA2, IgG4/IgD, IgG4/IgE, IgG4/IgG1, IgG4/IgG2, IgG4/IgG3, IgG4/IgG4, IgG4/IgM (or fragments or variants thereof), and optionally include a CH3 domain from one or more of IgA1, IgA2, IgD, IgE, IgG1, IgG2, IgG3, IgG4, or IgM, and/or a CH4 domain from IgE and/or IgM. In specific embodiments, the hinge, CH2, CH3, and CH4 domains are from human Ig.

[0543] Certain examples include hybrid Fc regions that comprise, consist of, or consist essentially of the following combination of hinge/CH3 domains: IgA1/IgA1, IgA1/IgA2, IgA1/IgD, IgA1/IgE, IgA1/IgG1, IgA1/IgG2, IgA1/IgG3, IgA1/IgG4, IgA1/IgM, IgA2/IgA1, IgA2/IgA2, IgA2/IgD, IgA2/IgE, IgA2/IgG1, IgA2/IgG2, IgA2/IgG3, IgA2/IgG4, IgA2/IgM, IgD/IgA1, IgD/IgA2, IgD/IgD, IgD/IgE, IgD/IgG1, IgD/IgG2, IgD/IgG3, IgD/IgG4, IgD/IgM, IgG1/IgA1, IgG1/IgA2, IgG1/IgD, IgG1/IgE, IgG1/IgG1, IgG1/IgG2, IgG1/IgG3, IgG1/IgG4, IgG1/IgM, IgG2/IgA1, IgG2/IgA2, IgG2/IgD, IgG2/IgE, IgG2/IgG1, IgG2/IgG2, IgG2/IgG3, IgG2/IgG4, IgG2/IgM, IgG3/IgA1, IgG3/IgA2, IgG3/IgD, IgG3/IgE, IgG3/IgG1, IgG3/IgG2, IgG3/IgG3, IgG3/IgG4, IgG3/IgM, IgG4/IgA1, IgG4/IgA2, IgG4/IgD, IgG4/IgE, IgG4/IgG1, IgG4/IgG2, IgG4/IgG3, IgG4/IgG4, IgG4/IgM (or fragments or variants thereof), and optionally include a CH2 domain from one or more of IgA1, IgA2, IgD, IgE, IgG1, IgG2, IgG3, IgG4, or IgM, and/or a CH4 domain from IgE and/or IgM. In specific embodiments, the hinge, CH2, CH3, and CH4 domains are from human Ig.

[0544] Some examples include hybrid Fc regions that comprise, consist of, or consist essentially of the following combination of hinge/CH4 domains: IgA1/IgE, IgA1/IgM, IgA2/IgE, IgA2/IgM, IgD/IgE, IgD/IgM, IgG1/IgE, IgG1/IgM, IgG2/IgE, IgG2/IgM, IgG3/IgE, IgG3/IgM, IgG4/IgE, IgG4/IgM (or fragments or variants thereof), and optionally include a CH2 domain from one or more of IgA1, IgA2, IgD, IgE, IgG1, IgG2, IgG3, IgG4, or IgM, and/or a CH3 domain from one or more of IgA1, IgA2, IgD, IgE, IgG1, IgG2, IgG3, IgG4, or IgM.

[0545] Specific examples of hybrid Fc regions can be found, for example, in WO 2008/147143, which are derived from combinations of IgG subclasses or combinations of human IgD and IgG.

[0546] Also included are antibodies, or antigen-binding fragments thereof, which have derivatized or otherwise modified Fc regions. In certain aspects, the Fc region may be modified by phosphorylation, sulfation, acrylation, glycosylation, methylation, farnesylation, acetylation, amidation, and the like, for instance, relative to a wild-type or naturally-occurring Fc region. In certain embodiments, the Fc region may comprise wild-type or native glycosylation patterns, or alternatively, it may comprise increased glycosylation relative to a native form, decreased glycosylation relative to a native form, or it may be entirely deglycosylated. As one example of a modified Fc glycoform, decreased glycosylation of an Fc region reduces binding to the C1q region of the first complement component C1, a decrease in ADCC-related activity, and/or a decrease in CDC-related activity. Certain embodiments thus employ a deglycosylated or aglycosylated Fc region. See, e.g., WO 2005/047337 for the production of exemplary aglycosylated Fc regions. Another example of an Fc region glycoform can be generated by substituting the Q295 position with a cysteine residue (see, e.g., U.S. Application No. 2010/0080794), according to the Kabat et al. numbering system. Certain embodiments may include Fc regions where about 80-100% of the glycoprotein in Fc region comprises a mature core carbohydrate structure that lacks fructose (see, e.g., U.S. Application No. 2010/0255013). Some embodiments may include Fc regions that are optimized by substitution or deletion to reduce the level of fucosylation, for instance, to increase affinity for FcγRI, FcγRIa, or FcγRIIIa, and/or to improve phagocytosis by FcγRIIa-expressing cells (see U.S. Application Nos. 2010/0249382 and 2007/0148170).

[0547] As another example of a modified Fc glycoform, an Fc region of an antibody or antigen-binding fragment thereof may comprise oligomannose-type N-glycans, and optionally have one or more of the following: increased ADCC effector activity, increased binding affinity for FcγRIIIA (and certain other FcRs), and/or similar or lower binding affinity for mannose receptor, relative to a corresponding Fc region that contains complex-type N-glycans (see, e.g., U.S. Application No. 2007/0092521 and U.S. Pat. No. 7,700,321). As another example, enhanced affinity of Fc regions for FcγRs has been achieved using engineered glycoforms generated by expression of antibodies in engineered or variant cell lines (see, e.g., Umana et al., Nat Biotechnol. 17:176-180, 1999; Davies et al., Biotechnol Bioeng. 74:288-294, 2001; Shields et al., J Biol Chem. 277:26733-26740, 2002; Shinkawa et al., 2003, J Biol Chem. 278:3466-3473, 2003; and U.S. Application No. 2007/0111281). Certain Fc region glycoforms comprise an increased proportion of N-glycoside bond type complex sugar chains, which do not have the 1-position of fucose bound to the 6-position of N-acetylglucosamine at the reducing end of the sugar chain (see, e.g., U.S. Application No. 2010/0092997). Particular embodiments may include IgG Fc region that is glycosylated with at least one galactose moiety connected to a respective terminal sialic acid moiety by an α-2,6 linkage, optionally where the Fc region has a higher anti-inflammatory activity relative to a corresponding, wild-type Fc region (see U.S. Application No. 2008/0206246). Certain of these and related altered glycosylation approaches have generated substantial enhancements of the capacity of Fc regions to selectively bind FcRs such as FcγRIII, to mediate ADCC, and to alter other properties of Fc regions, as described herein.

[0548] Certain modified Fc regions of an antibody or antigen-binding fragment thereof may have altered binding to one or more FcRs, and/or corresponding changes to effector function, relative to a corresponding, wild-type Fc sequence (e.g., same species, same Ig class, same Ig subclass). For instance, such Fc regions may have increased binding to one or more of Fcγ receptors, Fcα receptors, Feε receptors, and/or the neonatal Fc receptor, relative to a corresponding, wild-type Fc sequence. In other embodiments, variant, fragment, hybrid, or modified Fc regions may have decreased binding to one or more of Fcγ receptors, Fcα receptors, Feε receptors, and/or the neonatal Fc receptor, relative to a corresponding, wild-type Fc sequence. Specific FcRs are described elsewhere herein.

[0549] In some embodiments, an antibody comprises an Fc domain, comprising one or more mutations to increase binding to one or more of Fcγ receptors, Fcα receptors, Feε receptors, and/or the neonatal Fc receptor, relative to a corresponding, wild-type Fc sequence. In some embodiments, an antibody comprises an Fc domain, comprising one or more mutations to decrease binding to one or more of Fcγ receptors, Fcα receptors, Feε receptors, and/or the neonatal Fc receptor, relative to a corresponding, wild-type Fc sequence.

[0550] Specific examples of Fc variants having altered (e.g., increased, decreased) effector function/FcR binding can be found, for example, in U.S. Pat. Nos. 5,624,821 and 7,425,619; U.S.

[0551] Application Nos. 2009/0017023, 2009/0010921, and 2010/0203046; and WO 2000/42072 and WO 2004/016750. Certain examples include human Fc regions having a one or more substitutions at position 298, 333, and/or 334, for example, S298A, E333A, and/or K334A (based on the numbering of the EU index of Kabat et al.), which have been shown to increase binding to the activating receptor FcγRIIIa and reduce binding to the inhibitory receptor FcγRIIb. These mutations can be combined to obtain double and triple mutation variants that have further improvements in binding to FcRs. Certain embodiments include a S298A/E333A/K334A triple mutant, which has increased binding to FcγRIIIa, decreased binding to FcγRIIb, and increased ADCC (see, e.g., Shields et al., J Biol Chem. 276:6591-6604, 2001; and Presta et al., Biochem Soc Trans. 30:487-490, 2002). See also engineered Fc glycoforms that have increased binding to FcRs, as disclosed in Umana et al., supra; and U.S. Pat. No. 7,662,925. Some embodiments include Fc regions that comprise one or more substitutions selected from 434S, 252Y/428L, 252Y/4345, and 428L/4345 (see U.S. Application Nos. 2009/0163699 and 20060173170), based on the EU index of Kabat et al.

[0552] As noted above, certain modified Fc regions may have altered effector functions, relative to a corresponding, wild-type Fc sequence. For example, such Fc regions may have increased complement fixation or activation, increased C1q binding affinity, increased CDC-related activity, increased ADCC-related activity, and/or increased ADCP-related activity, relative to a corresponding, wild-type Fc sequence. In some embodiments, such Fc regions may have decreased complement fixation or activation, decreased C1q binding affinity, decreased CDC-related activity, decreased ADCC-related activity, and/or decreased ADCP-related activity, relative to a corresponding, wild-type Fc sequence. As merely one illustrative example, an Fc region may comprise a deletion or substitution in a complement-binding site, such as a C1q-binding site, and/or a deletion or substitution in an ADCC site. Examples of such deletions/substitutions are described, for example, in U.S. Pat. No. 7,030,226. Many Fc effector functions, such as ADCC, can be assayed according to routine techniques in the art. (see, e.g., Zuckerman et al., CRC Crit Rev Microbiol. 7:1-26, 1978). Useful effector cells for such assays includes, but are not limited to, natural killer (NK) cells, macrophages, and other peripheral blood mononuclear cells (PBMC). Alternatively, or additionally, certain Fc effector functions may be assessed in vivo, for example, by employing an animal model described in Clynes et al. PNAS. 95:652-656, 1998.

[0553] Certain modified Fc regions have altered stability or half-life relative to a corresponding, wild-type Fc sequence. In certain embodiments, such Fc regions may have increased half-life relative to a corresponding, wild-type Fc sequence. In some embodiments, modified Fc regions have decreased half-life relative to a corresponding, wild-type Fc sequence. Half-life can be measured in vitro (e.g., under physiological conditions) or in vivo, according to routine techniques in the art, such as radiolabeling, ELISA, or other methods. In vivo measurements of stability or half-life can be measured in one or more bodily fluids, including blood, serum, plasma, urine, or cerebrospinal fluid, or a given tissue, such as the liver, kidneys, muscle, central nervous system tissues, bone, etc. As one example, modifications to an Fc region that alter its ability to bind the FcRn can alter its half-life in vivo. Assays for measuring the in vivo pharmacokinetic properties (e.g., in vivo mean elimination half-life) and non-limiting examples of Fc modifications that alter its binding to the FcRn are described, for example, in U.S. Pat. Nos. 7,217,797 and 7,732,570; and U.S. Application Nos. US 2010/0143254 and 2010/0143254.

[0554] Additional non-limiting examples of modifications to alter stability or half-life include substitutions/deletions at one or more of amino acid residues selected from 251-256, 285-290, and 308-314 in the CH2 domain, and 385-389 and 428-436 in the CH3 domain, according to the numbering system of Kabat et al. See U.S. Application No. 2003/0190311. Specific examples include substitution with leucine at position 251, substitution with tyrosine, tryptophan or phenylalanine at position 252, substitution with threonine or serine at position 254, substitution with arginine at position 255, substitution with glutamine, arginine, serine, threonine, or glutamate at position 256, substitution with threonine at position 308, substitution with proline at position 309, substitution with serine at position 311, substitution with aspartate at position 312, substitution with leucine at position 314, substitution with arginine, aspartate or serine at position 385, substitution with threonine or proline at position 386, substitution with arginine or proline at position 387, substitution with proline, asparagine or serine at position 389, substitution with methionine or threonine at position 428, substitution with tyrosine or phenylalanine at position 434, substitution with histidine, arginine, lysine or serine at position 433, and/or substitution with histidine, tyrosine, arginine or threonine at position 436, including any combination thereof. Such modifications optionally increase affinity of the Fc region for the FcRn and thereby increase half-life, relative to a corresponding, wild-type Fc region.

[0555] Certain modified Fc regions have altered solubility relative to a corresponding, wild-type Fc sequence. In certain embodiments, such Fc regions have increased solubility relative to a corresponding, wild-type Fc sequence. In some embodiments, modified Fc regions have decreased solubility relative to a corresponding, wild-type Fc sequence. Solubility can be measured, for example, in vitro (e.g., under physiological conditions) according to routine techniques in the art. Exemplary solubility measurements are described elsewhere herein.

[0556] Additional examples of variants include IgG Fc regions having conservative or non-conservative substitutions (as described elsewhere herein) at one or more of positions 250, 314, or 428 of the heavy chain, or in any combination thereof, such as at positions 250 and 428, or at positions 250 and 314, or at positions 314 and 428, or at positions 250, 314, and 428 (see, e.g., U.S. Application No. 2011/0183412). In specific embodiments, the residue at position 250 is substituted with glutamic acid or glutamine, and/or the residue at position 428 is substituted with leucine or phenylalanine. As another illustrative example of an IgG Fc variant, any one or more of the amino acid residues at positions 214 to 238, 297 to 299, 318 to 322, and/or 327 to 331 may be used as a suitable target for modification (e.g., conservative or non-conservative substitution, deletion). In particular embodiments, the IgG Fc variant CH2 domain contains amino acid substitutions at positions 228, 234, 235, and/or 331 (e.g., human IgG4 with Ser228Pro and Leu235Ala mutations) to attenuate the effector functions of the Fc region (see U.S. Pat. No. 7,030,226). Here, the numbering of the residues in the heavy chain is that of the EU index (see Kabat et al., “Sequences of Proteins of Immunological Interest,” 5th Ed., National Institutes of Health, Bethesda, Md. (1991)). Certain of these and related embodiments have altered (e.g., increased, decreased) FcRn binding and/or serum half-life, optionally without reduced effector functions such as ADCC or CDC-related activities.

[0557] Additional examples include variant Fc regions that comprise one or more amino acid substitutions at positions 279, 341, 343 or 373 of a wild-type Fc region, or any combination thereof (see, e.g., U.S. Application No. 2007/0224188). The wild-type amino acid residues at these positions for human IgG are valine (279), glycine (341), proline (343) and tyrosine (373). The substation(s) can be conservative or non-conservative, or can include non-naturally occurring amino acids or mimetics, as described herein. Alone or in combination with these substitutions, certain embodiments may also employ a variant Fc region that comprises at least 1, 2, 3, 4, 5, 6, 7, 8, 9, 10 or more amino acid substitutions selected from the following: 235G, 235R, 236F, 236R, 236Y, 237K, 237N, 237R, 238E, 238G, 238H, 238I, 238L, 238V, 238W, 238Y, 244L, 245R, 247A, 247D, 247E, 247F, 247M, 247N, 247Q, 247R, 2475, 247T, 247W, 247Y, 248F, 248P, 248Q, 248W, 249L, 249M, 249N, 249P, 249Y, 251H, 251I, 251W, 254D, 254E, 254F, 254G, 254H, 254I, 254K, 254L, 254M, 254N, 254P, 254Q, 254R, 254V, 254W, 254Y, 255K, 255N, 256H, 256I, 256K, 256L, 256V, 256W, 256Y, 257A, 257I, 257M, 257N, 257S, 258D, 260S, 262L, 264S, 265K, 265S, 267H, 267I, 267K, 268K, 269N, 269Q, 271T, 272H, 272K, 272L, 272R, 279A, 279D, 279F, 279G, 279H, 279I, 279K, 279L, 279M, 279N, 279Q, 279R, 279S, 279T, 279W, 279Y, 280T, 283F, 283G, 283H, 283I, 283K, 283L, 283M, 283P, 283R, 283T, 283W, 283Y, 285N, 286F, 288N, 288P, 292E, 292F, 292G, 292I, 292L, 293S, 293V, 301W, 304E, 307E, 307M, 312P, 315F, 315K, 315L, 315P, 315R, 316F, 316K, 317P, 317T, 318N, 318P, 318T, 332F, 332G, 332L, 332M, 332S, 332V, 332W, 339D, 339E, 339F, 339G, 339H, 339I, 339K, 339L, 339M, 339N, 339Q, 339R, 339S, 339W, 339Y, 341D, 341E, 341F, 341H, 341I, 341K, 341L, 341M, 341N, 341P, 341Q, 341R, 341S, 341T, 341V, 341W, 341Y, 343A, 343D, 343E, 343F, 343G, 343H, 343I, 343K, 343L, 343M, 343N, 343Q, 343R, 343S, 343T, 343V, 343W, 343Y, 373D, 373E, 373F, 373G, 373H, 373I, 373K, 373L, 373M, 373N, 373Q, 373R, 373S, 373T, 373V, 373W, 375R, 376E, 376F, 376G, 376H, 376I, 376L, 376M, 376N, 376P, 376Q, 376R, 376S, 376T, 376V, 376W, 376Y, 377G, 377K, 377P, 378N, 379N, 379Q, 379S, 379T, 380D, 380N, 380S, 380T, 382D, 382F, 382H, 382I, 382K, 382L, 382M, 382N, 382P, 382Q, 382R, 382S, 382T, 382V, 382W, 382Y, 385E, 385P, 386K, 423N, 424H, 424M, 424V, 426D, 426L, 427N, 429A, 429F, 429M, 430A, 430D, 430F, 430G, 430H, 430I, 430K, 430L, 430M, 430N, 430P, 430Q, 430R, 430S, 430T, 430V, 430W, 430Y, 431H, 431K, 431P, 432R, 432S, 438G, 438K, 438L, 438T, 438W, 439E, 439H, 439Q, 440D, 440E, 440F, 440G, 440H, 440I, 440K, 440L, 440M, 440Q, 440T, 440V or 442K. As above, the numbering of the residues in the heavy chain is that of the EU index (see Kabat et al., supra). Such variant Fc regions typically confer an altered effector function or altered serum half-life upon the antibody to which the variant Fc region is operably attached. Preferably the altered effector function is an increase in ADCC, a decrease in ADCC, an increase in CDC, a decrease in CDC, an increase in C1q binding affinity, a decrease in C1q binding affinity, an increase in FcR (preferably FcRn) binding affinity or a decrease in FcR (preferably FcRn) binding affinity as compared to a corresponding Fc region that lacks such amino acid substitution(s).

[0558] Additional examples include variant Fc regions that comprise an amino acid substitution at one or more of position(s) 221, 222, 224, 227, 228, 230, 231, 223, 233, 234, 235, 236, 237, 238, 239, 240, 241, 243, 244, 245, 246, 247, 249, 250, 258, 262, 263, 264, 265, 266, 267, 268, 269, 270, 271, 272, 273, 274, 275, 276, 278, 280, 281, 283, 285, 286, 288, 290, 291, 293, 294, 295, 296, 297, 298, 299, 300, 302, 313, 317, 318, 320, 322, 323, 324, 325, 326, 327, 328, 329, 330, 331, 332, 333, 334, 335 336 and/or 428 (see, e.g., U.S. Pat. No. 7,662,925). In specific embodiments, the variant Fc region comprises at least one amino acid substitution selected from the group consisting of: P230A, E233D, L234E, L234Y, L234I, L235D, L235S, L235Y, L235I, S239D, S239E, S239N, S239Q, S239T, V240I, V240M, F243L, V264I, V264T, V264Y, V266I, E272Y, K274T, K274E, K274R, K274L, K274Y, F275W, N276L, Y278T, V302I, E318R, S324D, S324I, S324V, N325T, K326I, K326T, L328M, L328I, L328Q, L328D, L328V, L328T, A330Y, A330L, A330I, 1332D, I332E, I332N, I332Q, T335D, T335R, and T335Y. In other specific embodiments, the variant Fc region comprises at least one amino acid substitution selected from the group consisting of: V264I, F243L/V264I, L328M, I332E, L328M/I332E, V264I/I332E, S298A/I332E, S239E/I332E, S239Q/I332E, S239E, A330Y, I332D, L328I/I332E, L328Q/I332E, V264T, V240I, V266I, S239D, S239D/I332D, S239D/I332E, S239D/I332N, S239D/I332Q, S239E/I332D, S239E/I332N, S239E/I332Q, S239N/I332D, S239N/I332E, S239Q/I332D, A330Y/I332E, V264I/A330Y/I332E, A330L/I332E, V264I/A330L/I332E, L234E, L234Y, L234I, L235D, L235S, L235Y, L235I, S239T, V240M, V264Y, A330I, N325T, L328D/I332E, L328V/I332E, L328T/I332E, L328I/I332E, S239E/V264I/I332E, S239Q/V264I/I332E, S239E/V264I/A330Y/I332E, S239D/A330Y/I332E, S239N/A330Y/I332E, S239D/A330L/I332E, S239N/A330L/I332E, V264I/S298A/I332E, S239D/S298A/I332E, S239N/S298A/I332E, S239D/V264I/I332E, S239D/V264I/S298A/I332E, S239D/V264I/A330L/I332E, S239D/I332E/A330I, P230A, P230A/E233D/I332E, E272Y, K274T, K274E, K274R, K274L, K274Y, F275W, N276L, Y278T, V302I, E318R, S324D, S324I, S324V, K326I, K326T, T335D, T335R, T335Y, V240I/V266I, S239D/A330Y/I332E/L234I, S239D/A330Y/I332E/L235D, S239D/A330Y/I332E/V240I, S239D/A330Y/I332E/V264T, S239D/A330Y/I332E/K326E, and S239D/A330Y/I332E/K326T, In more specific embodiments, the variant Fc region comprises a series of substitutions selected from the group consisting of: N297D/I332E, F241Y/F243Y/V262T/V264T/N297D/I332E, S239D/N297D/I332E, S239E/N297D/I332E, S239D/D265Y/N297D/I332E, S239D/D265H/N297D/I332E, V264E/N297D/I332E, Y296N/N297D/I332E, N297D/A330Y/I332E, S239D/D265V/N297D/I332E, S239D/D265I/N297D/I332E, and N297D/S298A/A330Y/I332E. In specific embodiments, the variant Fc region comprises an amino acid substitution at position 332 (using the numbering of the EU index, Kabat et al., supra). Examples of substitutions include 332A, 332D, 332E, 332F, 332G, 332H, 332K, 332L, 332M, 332N, 332P, 332Q, 332R, 332S, 332T, 332V, 332W and 332Y. The numbering of the residues in the Fc region is that of the EU index of Kabat et al. Among other properties described herein, such variant Fc regions may have increased affinity for an FcγR, increased stability, and/or increased solubility, relative to a corresponding, wild-type Fc region.

[0559] Further examples include variant Fc regions that comprise one or more of the following amino acid substitutions: 224N/Y, 225A, 228L, 230S, 239P, 240A, 241L, 2435/L/G/H/I, 244L, 246E, 247L/A, 252T, 254T/P, 258K, 261Y, 265V, 266A, 267G/N, 268N, 269K/G, 273A, 276D, 278H, 279M, 280N, 283G, 285R, 288R, 289A, 290E, 291L, 292Q, 297D, 299A, 300H, 301C, 304G, 305A, 306I/F, 311R, 312N, 315D/K/S, 320R, 322E, 323A, 324T, 325S, 326E/R, 332T, 333D/G, 335I, 338R, 339T, 340Q, 341E, 342R, 344Q, 347R, 351S, 352A, 354A, 355W, 356G, 358T, 361D/Y, 362L, 364C, 365Q/P, 370R, 372L, 377V, 378T, 383N, 389S, 390D, 391C, 393A, 394A, 399G, 404S, 408G, 409R, 411I, 412A, 414M, 421S, 422I, 426F/P, 428T, 430K, 431S, 432P, 433P, 438L, 439E/R, 440G, 441F, 442T, 445R, 446A, 447E, optionally where the variant has altered recognition of an Fc ligand and/or altered effector function compared with a parent Fc polypeptide, and wherein the numbering of the residues is that of the EU index as in Kabat et al. Specific examples of these and related embodiments include variant Fc regions that comprise or consist of the following sets of substitutions: (1) N276D, R292Q, V305A, 1377V, T394A, V412A and K439E; (2) P244L, K246E, D399G and K409R; (3) S304G, K320R, S324T, K326E and M358T; (4) F243S, P247L, D265V, V266A, S383N and T411I; (5) H224N, F243L, T393A and H433P; (6) V240A, S267G, G341E and E356G; (7) M252T, P291L, P352A, R355W, N390D, S408G, S426F and A431S; (8) P228L, T289A, L365Q, N389S and 5440G; (9) F241L, V273A, K340Q and L441F; (10) F241L, T299A, 1332T and M428T; (11) E269K, Y300H, Q342R, V422I and G446A; (12) T225A, R301c, S304G, D312N, N315D, L351S and N421S; (13) S254T, L306I, K326R and Q362L; (14) H224Y, P230S, V323A, E333D, K338R and S364C; (15) T335I, K414M and P445R; (16) T335I and K414M; (17) P247A, E258K, D280N, K288R, N297D, T299A, K322E, Q342R, S354A and L365P; (18) H268N, V279M, A339T, N361D and S426P; (19) C261Y, K290E, L306F, Q311R, E333G and Q438L; (20) E283G, N315K, E333G, R344Q, L365P and S442T; (21) Q347R, N361Y and K439R; (22) S239P, S254P, S267N, H285R, N315S, F372L, A378T, N390D, Y391C, F404S, E430K, L432P and K447E; and (23) E269G, Y278H, N325S and K370R, wherein the numbering of the residues is that of the EU index as in Kabat et al. (see, e.g., U.S. Application No. 2010/0184959).

[0560] Variant Fc regions can also have one or more mutated hinge regions, as described, for example, in U.S. Application No. 2003/0118592. For instance, one or more cysteines in a hinge region can be deleted or substituted with a different amino acid. The mutated hinge region can comprise no cysteine residues, or it can comprise 1, 2, or 3 fewer cysteine residues than a corresponding, wild-type hinge region. In some embodiments, an Fc region having a mutated hinge region of this type exhibits a reduced ability to dimerize, relative to a wild-type Ig hinge region.

[0561] As noted above, antibodies having altered Fc regions typically have altered (e.g., improved, increased, decreased) pharmacokinetic properties relative to corresponding wild-type Fc region. Examples of pharmacokinetic properties include stability or half-life, bioavailability (the fraction of a drug that is absorbed), tissue distribution, volume of distribution (apparent volume in which a drug is distributed immediately after it has been injected intravenously and equilibrated between plasma and the surrounding tissues), concentration (initial or steady-state concentration of drug in plasma), elimination rate constant (rate at which drugs are removed from the body), elimination rate (rate of infusion required to balance elimination), area under the curve (AUC or exposure; integral of the concentration-time curve, after a single dose or in steady state), clearance (volume of plasma cleared of the drug per unit time), Cmax (peak plasma concentration of a drug after oral administration), Tmax (time to reach Cmax), Cmin (lowest concentration that a drug reaches before the next dose is administered), and fluctuation (peak trough fluctuation within one dosing interval at steady state).

[0562] In particular embodiments, an antibody, or antigen-binding fragment thereof, has a biological half life at about pH 7.4, at about a physiological pH, at about 25° C. or room temperature, and/or at about 37° C. or human body temperature (e.g., in vivo, in serum, in a given tissue, in a given species such as rat, mouse, monkey, or human), of about or at least about 30 minutes, about 1 hour, about 2 hour, about 3 hours, about 4 hours, about 5 hours, about 6 hours, about 12 hours, about 18 hours, about 20 hours, about 24 hours, about 30 hours, about 36 hours, about 40 hours, about 48 hours, about 50 hours, about 60 hours, about 70 hours, about 72 hours, about 80 hours, about 84 hours, about 90 hours, about 96 hours, about 120 hours, or about 144 hours or more, or about 1 week, or about 2 weeks, or about 3 weeks, or about 4 weeks, or about 5 weeks, or about 6 weeks or more, or any intervening half-life, including all ranges in between.

[0563] In some embodiments, an antibody, or antigen-binding fragment thereof, has a Tm of about or at least about 60, 62, 64, 66, 68, 70, 72, 74, or 75° C. In some embodiments, an antibody, or antigen-binding fragment, thereof has a Tm of about 60° C. or greater.

[0564] Any one or more of the foregoing anti-denatured collagen antibodies (including antigen-binding fragments thereof) can be combined with any one or more of the effector domains and linkers described herein, to generate one or more fusion proteins or larger, multi-chain structures comprising the same.

[0565] Effector Domains

[0566] The fusion proteins provided herein comprise at least one effector domain (e.g., an effector ligand domain), such as a cytokine or an immunomodulatory or anti-cancer antibody. In some instances, the effector domain comprises an immune cell-stimulatory ligand or domain, an immune cell-inhibitory ligand or domain, and/or a cytocidal (e.g., tumor cell cytocidal) ligand or domain.

[0567] Examples of effector domains or effector ligand domains include an interleukin-2 (IL-2) polypeptide, an interleukin-15 (IL-15) polypeptide, a hybrid IL-2/IL-15 polypeptide, a TNF superfamily ligand polypeptide, an interleukin-12 (IL-12) polypeptide, an interleukin-10 (IL-10) polypeptide, an interleukin-7 (IL-7) polypeptide, an interleukin-21 (IL-21) polypeptide, and an interferon-α (IFN-α) polypeptide. Examples of immunomodulatory or anti-cancer antibodies, and antigen-binding fragments thereof, are described herein, including anti-CD40 and anti-4-1BB antibodies, and antigen-binding fragments thereof.

[0568] Interleukin-2 (L-2). Certain effector domains comprise one or more “IL-2 polypeptides”, including human IL-2 polypeptides. IL-2 is a cytokine signals through the IL-2 receptor (IL-2R), a complex composed of up to three chains, termed the α (CD25), β (CD122) and γc (CD132) chains. IL-2 is produced by T-cells in response to antigenic or mitogenic stimulation, and is required for T-cell proliferation and other activities crucial to regulation of the immune response. IL-2 can stimulate B-cells, monocytes, lymphokine-activated killer cells, natural killer cells, and glioma cells, among other immune cells.

[0569] IL-2 is a 15-16 kDA protein composed of a signal peptide (residues 1-20) and an active mature protein (residues 21-153). Exemplary IL-2 protein sequences are provided in Table S1.

TABLE S1
Exemplary IL-2 polypeptide sequences

| | | SEQ |
|---|---|---|
| Name | Sequence | ID NO: |
| Human IL-2 | MYRMQLLSCIALSLALVTNSAPTSSSTKKTQLQLEHLLLDLQMILNGINNY | 426 |
| FL | KNPKLTRMLTFKFYMPKKATELKHLQCLEEELKPLEEVLNLAQSKNFHLRP | |
| Precursor | RDLISNINVIVLELKGSETTFMCEYADETATIVEFLNRWITFCQSIISTLT | |
| Human IL-2 | APTSSSTKKTQLQLEHLLLDLQMILNGINNYKNPKLTRMLTFKFYMPKKAT | 427 |
| mature form | ELKHLQCLEEELKPLEEVLNLAQSKNFHLRPRDLISNINVIVLELKGSETT | |
| (C125S) | FMCEYADETATIVEFLNRWITFSQSIISTLT | |
| Human IL-2 | APTSSSTKKTQLQLEHLLLDLQMILNGINNYKNPKLTRMLTFKFYMPKKAT | 428 |
| mature form | ELKHLQCLEEELKPLEEVLNLAHSKNFHFDPRDVVSNINVFVLELKGSETT | |
| (D10) | FMCEYADETATIVEFLNRWITFCQSIISTLT | |
| Q74H, L80F, | | |
| R81D, L85V, | | |
| I86V, and | | |
| I92F | | |
| Human IL-2 | APASSSTKKTQLQLEHLLLDLQMILNGINNYKNPKLTRMLTFKFYMPKKAT | 429 |
| mature form | ELKHLQCLEEELKPLEEVLNLAQSKNFHLRPRDLISNINVIVLELKGSETT | |
| with T3A | FMCEYADETATIVEFLNRWITFSQSIISTLT | |
| Human IL-2 | APASSSTKKTQLQLEHLLLDLQMILNGINNYKNPKLTRMLTAKFYMPKKAT | 430 |
| mature form | ELKHLQCLEEELKPLEEVLNLAQSKNFHLRPRDLISNINVIVLELKGSETT | |
| with T3A, | FMCEYADETATIVEFLNRWITFSQSIISTLT | |
| F42A | | |
| Human IL-2 | APASSSTKKTQLQLEHLLLDLQMILNGINNYKNPKLTRMLTFKFYMPKKAT | 431 |
| mature form | ELKHLQCLEEELKPLEEALNLAPSKNFHLRPRDLISNINVIVLELKGSETT | |
| with T3A, | FMCEYADETATIVEFLNRWITFSQSTISTLT | |
| V69A, Q74P, | | |
| I128T | | |
| Human IL-2 | APASSSTKKTQLQLEHLLLTLQMILNGINNYKNPKLTRMLTFKFYMPKKAT | 432 |
| mature form | ELKHLQCLEEELKPLEEVLNLAQSKNFHLRPRDLISNINVIVLELKGSETT | |
| with T3A, | FMCEYADETATIVEFLNRWITFSQSIISTLT | |
| D20T | | |
| Human IL-2 | APASSSTKKTQLQLEHLLLTLQMILNGINNYKNPKLTRMLTAKFYMPKKAT | 433 |
| mature form | ELKHLQCLEEELKPLEEVLNLAQSKNFHLRPRDLISNINVIVLELKGSETT | |
| with T3A, | FMCEYADETATIVEFLNRWITFSQSIISTLT | |
| D20T, F42A | | |
| Human IL-2 | APASSSTKKTQLQLEHLLLDLQMILNGINNYKNPKLTEMLTFKFYMPKKAT | 434 |
| mature form | ELKHLQCLEEELKPLEEVLNLAQSKNFHLRPRDLISNINVIVLELKGSETT | |
| with R38E, | FMCEYADETATIVEFLNRWITFSQSIISTLT | |
| T3A | | |
| Human IL-2 | APASSSTKKTQLQLEHLLLDLQMILNGINNYKNPKLTRMLTFKFYMPKKAT | 435 |
| mature form | ELKHLQCLEKELKPLEEVLNLAQSKNFHLRPRDLISNINVIVLELKGSETT | |
| with E61K, | FMCEYADETATIVEFLNRWITFSQSIISTLT | |
| T3A | | |
| Human IL-2 | APASSSTKKTQLQLEHLLLDLQMILNGINNYKNPKLTRMLTFKFYMPKKAT | 436 |
| mature form | ELKHLQCLEEKLKPLEEVLNLAQSKNFHLRPRDLISNINVIVLELKGSETT | |
| with E62K, | FMCEYADETATIVEFLNRWITFSQSIISTLT | |
| T3A | | |
| Human IL-2 | APASSSTKKTQLQLEHLLLDLQMILNGINNYKNPKLTRMLTFKFYMPKKAT | 437 |
| mature form | ELKHLQCLEKKLKPLEEVLNLAQSKNFHLRPRDLISNINVIVLELKGSETT | |
| with E61K, | FMCEYADETATIVEFLNRWITFSQSIISTLT | |
| E62K, T3A | | |
| Human IL-2 | APASSSTKKTQLQLEHLLLDLQMILNGINNYKNPKLTEMLTFKFYMPKKAT | 438 |
| mature form | ELKHLQCLEKKLKPLEEVLNLAQSKNFHLRPRDLISNINVIVLELKGSETT | |
| with R38E, | FMCEYADETATIVEFLNRWITFSQSIISTLT | |
| E61K, E62K, | | |
| T3A | | |
| Human IL-2 | APASSSTKKTQLQLEHLLLDLQMILNGINNYKNPKLTEMLTAKFYMPKKAT | 439 |
| mature form | ELKHLQCLEEELKPLEEVLNLAQSKNFHLRPRDLISNINVIVLELKGSETT | |
| with F42A, | FMCEYADETATIVEFLNRWITFSQSIISTLT | |
| R38E, T3A | | |
| Human IL-2 | APASSSTKKTQLQLEHLLLDLQMILNGINNYKNPKLTRMLTAKFYMPKKAT | 440 |
| mature form | ELKHLQCLEKELKPLEEVLNLAQSKNFHLRPRDLISNINVIVLELKGSETT | |
| with F42A, | FMCEYADETATIVEFLNRWITFSQSIISTLT | |
| E61K, T3A | | |
| Human IL-2 | APASSSTKKTQLQLEHLLLDLQMILNGINNYKNPKLTRMLTAKFYMPKKAT | 441 |
| mature form | ELKHLQCLEEKLKPLEEVLNLAQSKNFHLRPRDLISNINVIVLELKGSETT | |
| with F42A, | FMCEYADETATIVEFLNRWITFSQSIISTLT | |
| E62K, T3A | | |
| Human IL-2 | APASSSTKKTQLQLEHLLLDLQMILNGINNYKNPKLTRMLTAKFYMPKKAT | 442 |
| mature form | ELKHLQCLEKKLKPLEEVLNLAQSKNFHLRPRDLISNINVIVLELKGSETT | |
| with F42A, | FMCEYADETATIVEFLNRWITFSQSIISTLT | |
| E61K, E62K, | | |
| T3A | | |
| Human IL-2 | APASSSTKKTQLQLEHLLLDLQMILNGINNYKNPKLTEMLTAKFYMPKKAT | 443 |
| mature form | ELKHLQCLEKKLKPLEEVLNLAQSKNFHLRPRDLISNINVIVLELKGSETT | |
| with F42A, | FMCEYADETATIVEFLNRWITFSQSIISTLT | |
| R38E, E61K, | | |
| E62K, T3A | | |

[0570] Thus, in certain embodiments, an IL-2 protein comprises, consists, or consists essentially of an amino acid sequence selected from Table S1, or an active variant or fragment thereof that is at least 80, 85, 90, 95, 98, or 100% identical to a sequence selected from Table S1. Additional examples of active polypeptide “variants” and “fragments” are described elsewhere herein.

[0571] In some embodiments, an “active” IL-2 protein or fragment or variant is characterized, for example, by its ability to bind to an IL-2Rβ/γc and/or IL-2Rα/β/γc receptor chain present on the surface of an immune cell in vitro or in vivo, and stimulate downstream signaling activities. Examples of downstream signaling activities include IL-2 mediated signaling via one or more of the JAK-STAT, PI3K/Akt/mTOR, and MAPK/ERK pathways, including combinations thereof. Altogether, IL-2 signaling stimulates an array of downstream pathways leading to responses that have a significant role in the development, function, and survival of CD4 T cells, CD8 T cells, NK cells, NKT cells, macrophages, and intestinal intraepithelial lymphocytes, among others. In some embodiments, an IL-2 polypeptide has an anti-cancer activity.

[0572] In particular embodiments, the IL-2 protein is a mature form of IL-2, or an active variant or fragment thereof, which comprises, consists, or consists essentially of an amino acid sequence that is at least 80, 85, 90, 95, 98, or 100% identical to amino acids 21-153 of SEQ ID NO: 1. In some embodiments, the IL-2 protein comprises a C145X substitution, as defined by SEQ ID NO: 1, wherein X is any amino acid. In specific embodiments, the IL-2 protein comprises a C145S substitution as defined by SEQ ID NO: 1.

[0573] Certain IL-2 polypeptides comprise, consist, or consist essentially of an amino acid sequence that is at least 80, 85, 90, 95, 98, or 100% identical to SEQ ID NO: 2 (mature human IL-2 with C125S substitution). In some embodiments, an active variant or fragment of SEQ ID NO: 2 retains the S125 residue as defined therein. In some embodiments, the IL-2 protein comprises, consists, or consists essentially of an amino acid sequence that is at least 80, 85, 90, 95, 98, or 100% identical to SEQ ID NO: 3 (mature human IL-2 “D10” variant), optionally wherein the IL-2 protein retains any one or more of the Q74H, L80F, R81D, L85V, I86V, and/or I92F substitutions as defined by SEQ ID NO: 3.

[0574] Certain IL-2 comprise one or more defined amino acid substitutions relative to the exemplary amino acid sequences in Table S1. For example, some IL-2 polypeptides comprise one or more amino acid substitutions selected from K35C, R38C, T41C, F42C, E61C, and V69C as defined by SEQ ID NO: 2. In some embodiments, the IL-2 protein forms a disulfide bond with the IL-2 binding protein (e.g., IL-2Ra) via one or more of the cysteine substitutions selected from K35C, R38C, T41C, F42C, E61C, and V69C. Certain IL-2 polypeptides comprise one or more amino acid substitutions at position V69, Q74, and/or I128 as defined by SEQ ID NO: 2, including combinations thereof and including, for example, wherein the one or more amino acid substitutions are selected from V69A, Q74P, and I128T as defined by SEQ ID NO: 2. Some IL-2 polypeptides comprise one or more amino acid substitutions at position T3, D20, R38, F42, Y45, E61, E62, E68, and/or L72 as defined by SEQ ID NO: 2, including combinations thereof. Exemplary amino acid substitutions include T3A; D20T; R38A, R38E, and R38K; F42A, F42G, F42S, F42T, F42Q, F42E, F42N, F42D, F42R, F42K, and F42I; Y45A, Y45G, Y45S, Y45T, Y45Q, Y45E, Y45N, Y45D, Y45R, and Y45K; E61S and E61K; E62A, E62L, and E62K; E68A and E68V; and L72A, L72G, L72S, L72T, L72Q, L72E, L72N, L72D, L72R, and L72K, including combinations thereof. Particular examples of combinations of substitutions include T3A and F42A; T3A, V69A, Q74P, and I128T; T3A and D20T; T3A, D20T, and F42A; T3A and R38E; T3A and E62K; T3A, E61K, and E62K; T3A, R38E, E61K, E62K; T3A, R38E, and F42A; T3A, F42A, and E61K; T3A, F42A, and E62K; and T3A, F42A, E61K, and E62K. Thus, an IL-2 protein can comprise any one or more of the foregoing amino acid substitutions, including combinations thereof.

[0575] In certain embodiments, a potential O-glycosylation site in IL-2 is substituted with alanine (T3A). In some embodiments, an F42A substitution in IL-2 reduces IL-2 binding affinity towards IL-2Rα. In some embodiments, a triple mutant (V69A, Q74P, and I128T) of IL-2 has higher binding affinity towards IL-2Rα. In certain embodiments, a D20T substitution in IL-2 does not significantly reduce binding affinity to IL-2Ra binding affinity but significantly reduces signaling activity towards intermediate affinity IL-2R receptors.

[0576] In some embodiments, the IL-2 protein comprises one or more amino acid substitutions at residues selected from A1, P2, A3, S4, and S5, as defined by SEQ ID NO: 2 or 3, or comprises N-terminal deletion of 1, 2, 3, 4, or 5 amino acids, as defined by SEQ ID NO: 2 or 3.

[0577] Any one or more of the foregoing IL-2 polypeptides can be combined with any of the anti-denatured collagen antibodies (including antigen-binding fragments thereof) and linkers described herein, to generate one or more fusion proteins or larger, multi-chain structures comprising the same.

[0578] Interleukin-15 (IL-15). Certain effector domains comprise one or more IL-15 polypeptides, including human IL-15 polypeptides. IL-15 is a pleiotropic cytokine that has been shown to induce and regulate a myriad of immune functions. For example, IL-15 is critical for lymphoid development, peripheral maintenance of innate immune cells, and immunological memory of T cells, mainly natural killer (NK) and CD8+ T cell populations. Like IL-2, IL-15 binds to and signals through a complex composed of IL-2/IL-15 receptor beta chain (CD122) and the common gamma chain (gamma-C, CD132).

[0579] IL-15 is a 14-15 kDA protein composed of a signal peptide (residues 1-29), a propeptide (residues 30-48), and an active mature protein (residues 49-162). Exemplary IL-15 protein sequences are provided in Table S2.

TABLE S2
Exemplary IL-15 polypeptide sequences

| | | SEQ ID |
|---|---|---|
| Name | Sequence | NO: |
| Human IL-15 | MRISKPHLRSISIQCYLCLLLNSHFLTEAGIHVFILGCFSAGLPKTEANW | 444 |
| FL precursor | VNVISDLKKIEDLIQSMHIDATLYTESDVHPSCKVTAMKCFLLELQVISL | |
| | ESGDASIHDTVENLIILANNSLSSNGNVTESGCKECEELEEKNIKEFLQS | |
| | FVHIVQMFINTS | |
| Human IL-15 | NWVNVISDLKKIEDLIQSMHIDATLYTESDVHPSCKVTAMKCFLLELQVI | 445 |
| mature form | SLESGDASIHDTVENLIILANNSLSSNGNVTESGCKECEELEEKNIKEFL | |
| | QSFVHIVQMFINTS | |
| Human IL-15 | NWVNVISDLKKIEDLIQSMHIDATLYTESDVHPSCKVTAMKCFLLELQVI | 446 |
| mature form | SLESGDASIHDTVENLIILANNSLSSNGNVTESGCKECEELEEKNIKEFL | |
| with S162A | QSFVHIVQMFINTA | |
| Human IL-15 | NWVNVISDLKKIEDLIQSMHIDATLYTESDVHPSCKVTAMKCFLLELQDI | 447 |
| mature form | SLESGDASIHDTVENLIILANNSLSSNGNVTESGCKECEELEEKNIKEFL | |
| with V49D, | QSFVHIVQMFINTA | |
| S162A | | |
| Human IL-15 | NWVNVISDLKKIEDLIQSMHIDATLYTESDVHPSCKVTAMKCFLLELQVD | 448 |
| mature form | SLESGDASIHDTVENLIILANNSLSSNGNVTESGCKECEELEEKNIKEFL | |
| with I50D, | QSFVHIVQMFINTA | |
| S162A | | |
| Human IL-15 | NWVNVISDLKKIEDLIQSMHIDATLYTESDVHPSCKVTAMKCFLLELQVI | 449 |
| mature form | SLESGDASIHDTVENEIILANNSLSSNGNVTESGCKECEELEEKNIKEFL | |
| with L66E, | QSFVHIVQMFINTA | |
| S162A | | |
| Human IL-15 | NWVNVISNLKKIEDLIQSMHIDATLYTESDVHPSCKVTAMKCFLLELQVI | 450 |
| mature form | SLESGDASIHDTVENLIILANNSLSSNGNVTESGCKECEELEEKNIKEFL | |
| with D8N, | QSFVHIVQMFINTA | |
| S162A | | |
| Human IL-15 | NWVNVISDLKKIEDLIQSMHIDATLYTESDVHPSCKVTAMKCFLLKLQVI | 451 |
| mature form | SLESGDASIHDTVENLIILANNSLSSNGNVTESGCKECEELEEKNIKEFL | |
| with E46K, | QSFVHIVQMFINTA | |
| S162A | | |
| Human IL-15 | NWVNVISDLKKIEDLIQSMHIDATLYTESDVHPSCKVTAMKCFLLKLQVI | 452 |
| mature form | SLKSGDASIHDTVENLIILANNSLSSNGNVTESGCKECEELEEKNIKEFL | |
| with E46K, | QSFVHIVQMFINTA | |
| E53K, S162A | | |
| Human IL-15 | NWVNVISDLKKIEDLIQSMHIKATLYTESDVHPSCKVTAMKCFLLKLQVI | 453 |
| mature form | SLESGDASIHDTVENLIILANNSLSSNGNVTESGCKECEELEEKNIKEFL | |
| with D22K, | QSFVHIVQMFINTA | |
| E46K, S162A | | |
| Human IL-15 | NWVNVISDLKKIEDLIQSMHIKATLYTESDVHPSCKVTAMKCFLLKLQVI | 454 |
| mature form | SLKSGDASIHDTVENLIILANNSLSSNGNVTESGCKECEELEEKNIKEFL | |
| with D22K, | QSFVHIVQMFINTA | |
| E46K, E53K, | | |
| S162A | | |

[0580] Thus, in certain embodiments, an IL-15 protein comprises, consists, or consists essentially of an amino acid sequence selected from Table S2, or an active variant or fragment thereof that is at least 80, 85, 90, 95, 98, or 100% identical to a sequence selected from Table S2. Additional examples of active polypeptide “variants” and “fragments” are described elsewhere herein.

[0581] In some embodiments, an “active” IL-15 protein or fragment or variant is characterized, for example, by its ability to bind to an IL-15Rβ/γc and/or IL-15Rα/β/γc receptor chain present on the surface of an immune cell in vitro or in vivo, and stimulate downstream signaling activities. Examples of downstream signaling activities include IL-15 mediated signaling via Janus kinase 1 (Jak1) and γc subunit Janus kinase 3 (Jak3), which leads to phosphorylation and activation of signal transducer and activator of transcription 3 (STAT3) and STAT5 pathways. Additional examples include activation of Src family kinases including Lck and Fyn, and subsequent activation of PI3K and MAPK signaling pathways. Altogether, IL-15 signaling stimulates an array of downstream pathways leading to responses that have a significant role in the regulating the activation and proliferation of T and natural killer (NK) cells, and the survival of memory T cells, among others. In particular embodiments, an activated IL-15 polypeptide elicits potent antitumor responses upon activation in target tissues, that is, a tumor microenvironment.

[0582] In particular embodiments, the IL-15 protein is a mature form of IL-15, or an active variant or fragment thereof, which comprises, consists, or consists essentially of an amino acid sequence that is at least 80, 85, 90, 95, 98, or 100% identical to amino acids 49-162 of SEQ ID NO: 27 (Human IL-15 FL precursor). Certain IL-15 polypeptides comprise, consist, or consist essentially of an amino acid sequence that is at least 80, 85, 90, 95, 98, or 100% identical to SEQ ID NO: 28 (mature human IL-15).

[0583] Certain IL-15 polypeptides comprise one or more defined amino acid substitutions relative to the exemplary amino acid sequences in Table S2. For example, in certain embodiments an IL-15 protein comprises or retains one or more amino acid substitutions at position D8, D22, E46, V49, 150, L66, and/or S162 as defined by SEQ ID NO: 26 (mature human IL-15). Specific examples of substitutions are selected from one or more of D8N, D22K, E46K, V49D, I50D, L66E, and 162A, including combinations thereof (see Table S3). Exemplar combinations of substitutions are selected from V49D and S162A; I50D and S162A; L66E and S162A; D8N and S162A; V49D and S162A; E46K and S162A; E46K, E53K, and S162A; D22K, E46K, and S162A; and D22K, E46K, E53K, and S162A.

[0584] In some embodiments, a D8N substitution in IL-15 does not significantly reduce binding affinity to IL-15Rα significantly reduces or all but eliminates IL-15 signaling activity. In some embodiments a V49D substitution in IL-15 has significantly lower (e.g., about 13 fold lower) binding affinity to IL-15Rα and retains about or at least about 90-100% of IL-15 signaling activity. In some embodiments, an I50D substitution in IL-15 has significantly lower (e.g., about 100 fold lower) binding affinity to IL-15Rα and retains about 10% of IL-15 signaling activity. In some embodiments, a L66E substitution in IL-15 has significantly lower (e.g., about 15 fold lower) binding affinity to IL-15Rα and retains little to no IL-15 signaling activity.

[0585] Any one or more of the foregoing IL-15 polypeptides can be combined with any of the anti-denatured collagen antibodies (including antigen-binding fragments thereof) and linkers described herein, to generate one or more fusion proteins or larger, multi-chain structures comprising the same.

[0586] Hybrid IL-2/IL-15. Certain effector domains comprise one or more hybrid IL-2/IL-15 polypeptides (see, for example, Silva et al., Nature 565:186-191, 2019). Exemplary hybrid IL-2/IL-15 polypeptides are provided in Table S3.

TABLE S3
Exemplary Hybrid IL-2/IL-15 Polypeptide

| | | SEQ ID |
|---|---|---|
| Name | Sequence | NO. |
| Neoleukin | GSHMPKKKIQLHAEHALYDALMILN | 455 |
| 2/15 | IVKTNSPPAEEKLEDYAFNFELILE | |
| | EIARLFESGDQKDEAEKAKRMKEWM | |
| | KRIKTTASEDEQEEMANAIITILQS | |
| | WIFS | |

[0587] Thus, in certain embodiments, a hybrid IL-2/IL-15 protein comprises, consists, or consists essentially of an amino acid sequence selected from Table S3, or an active variant or fragment thereof that is at least 80, 85, 90, 95, 98, or 100% identical to a sequence selected from Table S3. An active variant or fragment has one or more IL-2 activities and/or IL-15 activities described herein. Additional examples of active polypeptide “variants” and “fragments” are described elsewhere herein.

[0588] In some embodiments, an “active” IL-2/IL-15 hybrid protein or fragment or variant is characterized, for example, by its ability to bind to an IL-2Rβ/γc, IL-2Rα/β/γc, IL-15Rβ/γc, and/or IL-15Rα/β/γc receptor chain present on the surface of an immune cell in vitro or in vivo, and stimulate downstream signaling activities

[0589] Any one or more of the foregoing hybrid IL-2/IL-15 polypeptides can be combined with any of the anti-denatured collagen antibodies (including antigen-binding fragments thereof) and linkers described herein, to generate one or more fusion proteins or larger, multi-chain structures comprising the same.

[0590] TNF Superfamily Ligands. Certain effector domains comprise one or more Tumor Necrosis Factor (TNF) superfamily ligands, also referred to as TNF superfamily ligand polypeptides. The Tumor Necrosis Factor receptor superfamily (TNFRSF) is a protein superfamily of cytokine receptors characterized by the ability to bind tumor necrosis factors (TNFs) via an extracellular cysteine-rich domain. With the exception of nerve growth factor (NGF), all TNFs are homologous to the archetypal TNF-α. TNF receptors are primarily involved in apoptosis and inflammation, but also regulate other signal transduction pathways, such as cell proliferation, survival, and differentiation. The term death receptor refers to those members of the TNF receptor superfamily that contain a death domain, examples of which include TNFR1, the Fas receptor, Death Receptor 4 (DR4), and Death Receptor 5 (DR5).

[0591] An illustrative list of TNF superfamily receptors and their corresponding ligands is provided in Table T1 below.

TABLE T1
Exemplary TNF Superfamily Members

| Cell Receptor(s) | Synonyms | Ligand(s) |
|---|---|---|
| Death receptor 4 | TRAILR1, Apo-2, | TRAIL |
| | CD261 | |
| Death receptor 5 | TRAILR2, CD262 | |
| Decoy receptor 1 | TRAILR3, LIT, | |
| | TRID, CD263 | |
| Decoy receptor 2 | TRAILR4, TRUNDD, | |
| | CD264 | |
| Tumor necrosis factor | CD120a | TNF-α |
| receptor 1 | | |
| Tumor necrosis factor | CD120b | |
| receptor 2 | | |
| Fas receptor | Apo-1, CD95 | FasL |
| Lymphotoxin beta | CD18 | Lymphotoxin |
| receptor | | beta (TNF-C) |
| OX4 0 | CD134 | OX40L |
| CD40 | Bp50 | CD154 |
| Decoy receptor 3 | TR6, M68 | FasL, LIGHT, TL1A |
| CD27 | S152, Tp55 | CD70, Siva |
| CD30 | Ki-1 | CD153 |
| 4-1BB | CD137 | 4-1BBL |
| RANK | CD265 | RANKL |
| Osteoprotegerin | OCIF, TR1 | |
| TWEAK receptor | Fn14, CD266 | TWEAK |
| TACI | IGAD2, CD267 | APRIL, BAFF, |
| | | CAMLG |
| BAFF receptor | CD268 | BAFF |
| Herpesvirus entry | ATAR, TR2, CD270 | LIGHT |
| mediator | | |
| Nerve growth factor | p75NTR, CD271 | NGF, BDNF, NT-3, |
| receptor | | NT-4 |
| B-cell maturation antigen | TNFRSF13A, CD269 | BAFF |
| Glucocorticoid-induced | AITR, CD357 | GITR ligand |
| TNFR-related | | |
| Death receptor 3 | Apo-3, TRAMP, | TL1A |
| | LARD, WS-1 | |
| Ectodysplasin A2 | XEDAR | EDA-A2 |
| receptor | | |

[0592] Thus, in certain embodiments, the TNF superfamily ligand component of the fusion protein is selected from a ligand polypeptide in Table T1. In certain embodiments, the TNF superfamily ligand is a human polypeptide ligand selected from Table T1.

[0593] In some embodiments, the TNF superfamily ligand is a trimeric or homotrimeric polypeptide, for example, a single chain trimeric TRAIL or a single chain trimeric 4-1BBL. In certain embodiments, the TNF superfamily ligand is a trimeric or homotrimeric polypeptide ligand selected from Table T1.

[0594] In some embodiments, the TNF superfamily ligand induces apoptosis in cancer cells, for example, by binding to a death domain or death receptor of a TNF superfamily receptor. Thus, in some embodiments, TNF superfamily ligand (e.g., trimeric or homotrimeric ligand) binds to at least one TNF death receptor, or a TNF superfamily receptor that contains at least one death domain. Examples of TNF superfamily death receptors include TNFR1, Fas receptor, DR4, and DR5. Particular examples of death receptor ligands include TRAIL, TNF-α, and FasL. Thus, in certain embodiments, the TNF superfamily ligand component of the conjugate is selected from one or more of TRAIL, TNF-α, and FasL, optionally a human TRAIL, human TNF-α, or human FasL.

[0595] The amino acid sequences of exemplary TNF superfamily ligands are provided in Table S4 below.

TABLE S4
Exemplary TNF Superfamily Ligand Sequences

| | | SEQ ID |
|---|---|---|
| Name | Sequence | NO. |
| FL TRAIL | MAMMEVQGGPSLGQTCVLIVIFTVLLQSLCVAVTYVYFTNELKQMQDK | 456 |
| (1-281) | YSKSGIACFLKEDDSYWDPNDEESMNSPCWQVKWQLRQLVRKMILRTS | |
| | EETISTVQEKQQNISPLVRERGPQRVAAHITGTRGRSNTLSSPNSKNE | |
| | KALGRKINSWESSRSGHSFLSNLHLRNGELVIHEKGFYYIYSQTYFRF | |
| | QEEIKENTKNDKQMVQYIYKYTSYPDPILLMKSARNSCWSKDAEYGLY | |
| | SIYQGGIFELKENDRIFVSVTNEHLIDMDHEASFFGAFLVG | |
| TRAIL | VRERGPQRVAAHITGTRGRSNTLSSPNSKNEKALGRKINSWESSRSGH | 457 |
| extracellular | SFLSNLHLRNGELVIHEKGFYYIYSQTYFRFQEEIKENTKNDKQMVQY | |
| domain | IYKYTSYPDPILLMKSARNSCWSKDAEYGLYSIYQGGIFELKENDRIF | |
| (114-281) | VSVTNEHLIDMDHEASFFGAFLVG | |
| 4-1BBL | MEYASDASLDPEAPWPPAPRARACRVLPWALVAGLLLLLLLAAACAVF | 458 |
| | LACPWAVSGARASPGSAASPRLREGPELSPDDPAGLLDLRQGMFAQLV | |
| | AQNVLLIDGPLSWYSDPGLAGVSLTGGLSYKEDTKELVVAKAGVYYVF | |
| | FQLELRRVVAGEGSGSVSLALHLQPLRSAAGAAALALTVDLPPASSEA | |
| | RNSAFGFQGRLLHLSAGQRLGVHLHTEARARHAWQLTQGATVLGLFRV | |
| | TPEIPAGLPSPRSE | |
| 4-1BBL | ACPWAVSGARASPGSAASPRLREGPELSPDDPAGLLDLRQGMFAQLVA | 459 |
| extracellular | QNVLLIDGPLSWYSDPGLAGVSLTGGLSYKEDTKELVVAKAGVYYVFF | |
| domain | QLELRRVVAGEGSGSVSLALHLQPLRSAAGAAALALTVDLPPASSEAR | |
| (50-254) | NSAFGFQGRLLHLSAGQRLGVHLHTEARARHAWQLTQGATVLGLFRVT | |
| | PEIPAGLPSPRSE | |

[0596] In some embodiments, the TNF superfamily ligand component of the fusion protein comprises, consists, or consists essentially of an amino acid sequence selected from Table S4, or an active variant or fragment thereof. Particular examples of variants and fragments comprise, consist, or consist essentially of an amino acid sequence that is at least 80%, 95%, 90%, 95%, 96%, 97%, 98%, or 99% identical to a sequence selected from Table S4. Additional examples of active polypeptide “variants” and “fragments” are described elsewhere herein.

[0597] In specific embodiments, the TNF superfamily ligand component of the fusion protein is a human TNF-related apoptosis-inducing ligand (TRAIL) polypeptide, or an active variant or fragment thereof, including single chain trimeric TRAIL. TRAIL is a cytokine that is produced and secreted by most normal tissue cells. It causes apoptosis in tumor cells, for example, by binding to certain death receptors. The predicted 281 amino acid TRAIL protein has the characteristic structure of a type II membrane protein, with a single internal hydrophobic domain and no signal sequence. The extracellular C-terminal domain of TRAIL shares 22 to 28% identity with the C-terminal domains of other TNF family members. Formation of a complex between TRAIL and its signaling receptors, DR4 and DR5, triggers apoptosis by inducing the oligomerization of intracellular death domains. In some instances, a TRAIL polypeptide has an anti-cancer activity.

[0598] In certain embodiments, the TRAIL component of the conjugate comprises, consists, or consists essentially of a TRAIL sequence from Table S4, or an active variant or fragment thereof. In some embodiments, an “active” TRAIL polypeptide or fragment or variant is characterized, for example, by its ability to bind to death receptors, as described herein, and induce apoptosis, for example, in tumor cells. Specific examples of TRAIL variants include those having any one or more of the following substitutions; S96C, S101C, S111C, R170C, and K179C. In some embodiments, the TRAIL variant has a set of amino acid substitutions at the residue position selected from one or more of Y189Q, R191K, Q193R; H264R, I266L, D267Q; Y189Q, R191K, Q193R; and Y189Q, R191K, Q193R, I266L (see U.S. Application Nos. 2013/0165383; and 2012/0165267, incorporated by reference). Particular examples of TRAIL fragments include residues 114-281 (extracellular domain), residues 95-281, residues 92-281, residues 91-281, residues 41-281, residues 39-281, residues 15-281, residues 119-281, and residues 1-281 of the full-length sequence (SEQ ID NO: _). Additional examples of polypeptide “variants” and “fragments” are described elsewhere herein.

[0599] In specific embodiments, the TNF superfamily ligand component of the fusion protein is a human 4-1BBL polypeptide, or an active variant or fragment thereof, including single chain trimeric 4-1BB. 4-1BBL (4-1BB ligand, CD137L) is expressed on antigen presenting cells and binds to 4-1BB (also known as CD137), a type 2 transmembrane glycoprotein receptor of the TNF superfamily that is expressed on activated T Lymphocytes. In certain embodiments, the 4-1BBL component of the conjugate comprises, consists, or consists essentially of a 4-1BBL sequence from Table S4, or an active variant or fragment thereof. In some embodiments, an “active” 4-1BBL polypeptide or fragment or variant is characterized, for example, by its ability to bind to 4-1BB receptor chain present on the surface of an immune cell or cancer cell in vitro or in vivo, and stimulate downstream signaling activities, absent steric hindrance by the binding moieties described herein. Exemplary activities include inducing the proliferation of activated peripheral blood T cells, increasing proliferation, cytokine production, and survival of CD8 T cells, including by enhancing anti-tumor activity in a CD8 T-cell-dependent manner. In certain embodiments, a 4-1BBL polypeptide has an anti-cancer activity.

[0600] Any one or more of the foregoing TNF superfamily ligand polypeptides can be combined with any of the anti-denatured collagen antibodies (including antigen-binding fragments thereof) and linkers described herein, to generate one or more fusion proteins or larger, multi-chain structures comprising the same.

[0601] Interleukin-12 (IL-12). Certain effector domains comprise one or more IL-12 polypeptides. IL-12 is produced by dendritic cells, macrophages, neutrophils, and human B-lymphoblastoid cells (NC-37) in response to antigenic stimulation. IL-12 binds to the IL-12 receptor, which is a heterodimeric receptor formed by IL-12Rβ1 and IL-12Rβ2.

[0602] IL-12 is a heterodimeric cytokine encoded by two separate genes, IL-12A (p35) and IL-12B (p40). The active heterodimer (referred to as “p70”), and a homodimer of p40 are formed following protein synthesis. Exemplary IL-12 polypeptide sequences are provided in Table S5.

TABLE S5
Exemplary IL-12 Polypeptide

| | | SEQ ID |
|---|---|---|
| Name | Sequence | NO. |
| Human IL-12A | MCPARSLLLVATLVLLDHLSLARNLPVATPDPGMFPCLHHSQNLLRAV | 460 |
| Full-length | SNMLQKARQTLEFYPCTSEEIDHEDITKDKTSTVEACLPLELTKNESC | |
| | LNSRETSFITNGSCLASRKTSFMMALCLSSIYEDLKMYQVEFKTMNAK | |
| | LLMDPKRQIFLDQNMLAVIDELMQALNFNSETVPQKSSLEEPDFYKTK | |
| | IKLCILLHAFRIRAVTIDRVMSYLNAS | |
| Human IL-12A | RNLPVATPDPGMFPCLHHSQNLLRAVSNMLQKARQTLEFYPCTSEEID | 461 |
| Mature | HEDITKDKTSTVEACLPLELTKNESCLNSRETSFITNGSCLASRKTSF | |
| | MMALCLSSIYEDLKMYQVEFKTMNAKLLMDPKRQIFLDQNMLAVIDEL | |
| | MQALNFNSETVPQKSSLEEPDFYKTKIKLCILLHAFRIRAVTIDRVMS | |
| | YLNAS | |
| Human IL-12B | MCHQQLVISWFSLVFLASPLVAIWELKKDVYVVELDWYPDAPGEMVVL | 462 |
| Full-length | TCDTPEEDGITWTLDQSSEVLGSGKTLTIQVKEFGDAGQYTCHKGGEV | |
| | LSHSLLLLHKKEDGIWSTDILKDQKEPKNKTFLRCEAKNYSGRFTCWW | |
| | LTTISTDLTFSVKSSRGSSDPQGVTCGAATLSAERVRGDNKEYEYSVE | |
| | CQEDSACPAAEESLPIEVMVDAVHKLKYENYTSSFFIRDIIKPDPPKN | |
| | LQLKPLKNSRQVEVSWEYPDTWSTPHSYFSLTFCVQVQGKSKREKKDR | |
| | VFTDKTSATVICRKNASISVRAQDRYYSSSWSEWASVPCS | |
| Human IL-12B | IWELKKDVYVVELDWYPDAPGEMVVLTCDTPEEDGITWTLDQSSEVLG | 463 |
| Mature | SGKTLTIQVKEFGDAGQYTCHKGGEVLSHSLLLLHKKEDGIWSTDILK | |
| | DQKEPKNKTFLRCEAKNYSGRFTCWWLTTISTDLTFSVKSSRGSSDPQ | |
| | GVTCGAATLSAERVRGDNKEYEYSVECQEDSACPAAEESLPIEVMVDA | |
| | VHKLKYENYTSSFFIRDIIKPDPPKNLQLKPLKNSRQVEVSWEYPDTW | |
| | STPHSYFSLTFCVQVQGKSKREKKDRVFTDKTSATVICRKNASISVRA | |
| | QDRYYSSSWSEWASVPCS | |
| Human IL-12B | IWELKKDVYVVELDWYPDAPGEMVVLTCDTPEEDGITWTLDQSSEVLG | 464 |
| Ig-like C2- | SGKTLTIQVKEFGDAGQYTCHKGGEVLSHSLLLLHK | |
| type domain | | |
| (23-106) | | |
| Human IL-12B | PPKNLQLKPLKNSRQVEVSWEYPDTWSTPHSYFSLTFCVQVQGKSKRE | 465 |
| Fibronectin | KKDRVFTDKTSATVICRKNASISVRAQDRYYSSSWSEWASVPCS | |
| type-III | | |
| domain | | |
| (237-328) | | |

[0603] Thus, in certain embodiments, an IL-12 protein comprises, consists, or consists essentially of one or more amino acid sequences selected from Table S5, or an active variant or fragment thereof that is at least 80, 85, 90, 95, 98, or 100% identical to a sequence selected from Table S5. Additional examples of active polypeptide “variants” and “fragments” are described elsewhere herein.

[0604] In some embodiments, an “active” IL-12 protein or fragment or variant is characterized, for example, by its ability to bind to an IL-12Rβ1 and/or IL-12Rβ2 receptor chain present on the surface of an immune cell in vitro or in vivo, and stimulate downstream signaling activities. Certain exemplary downstream activities include differentiation of naive T cells into Th1 cells, stimulating growth and function of T cells generally, activation of the cytotoxic activity of natural killer (NK) cells and cytotoxic T lymphocytes, and anti-angiogenic activities (i.e., reducing formation of new blood vessels), among other activities. Additional examples include stimulating the production of interferon-gamma (IFN-γ) and tumor necrosis factor-alpha (TNF-α) from T cells and NK cells, and reducing IL-4 mediated suppression of IFN-γ.

[0605] In some instances, IL-12 binds to the IL-12Rβ2 subunit of IL-12 receptor, which is found on activated T cells and is stimulated by cytokines that promote Th1 cell development and inhibited by those that promote Th2 cell development. Upon binding, IL-12R-β2 becomes tyrosine phosphorylated and provides binding sites for kinases, Tyk2 and Jak2, which in turn activate transcription factor proteins such as STAT4. Thus, in some instances, an active IL-12 polypeptide activates the JAK-STAT pathway. In some instances, an IL-12 polypeptide has an anti-cancer activity.

[0606] In particular embodiments, the IL-12 polypeptide is a mature form of IL-12, or an active variant or fragment thereof, which comprises, consists, or consists essentially of an amino acid sequence of the mature forms of human IL-12A and/or IL-12B. Certain IL-12 polypeptides thus comprise, consist, or consist essentially of an amino acid sequence that is at least 80, 85, 90, 95, 98, or 100% identical to SEQ ID NO: _ (mature human IL-12A) and/or_ (mature human IL-12B). Exemplary fragments of IL-12 include the Ig-like C2-type domain (23-106) and the fibronectin type-III domain (237-328) of IL12B. Certain IL-12 polypeptides comprise one or more amino acid substitutions relative to the exemplary amino acid sequences in Table S5.

[0607] Any one or more of the foregoing IL-12 polypeptides can be combined with any of the anti-denatured collagen antibodies (including antigen-binding fragments thereof) and linkers described herein, to generate one or more fusion proteins or larger, multi-chain structures comprising the same.

[0608] Interleukin-10 (IL-10). Certain effector domains comprise one or more IL-10 polypeptides. IL-10, also known as human cytokine synthesis inhibitory factor (CSIF), is generally considered an anti-inflammatory cytokine, but has immunostimulatory activities in the immuno-oncology context. IL-10 has multiple, pleiotropic, effects in immuno-regulation and inflammation.

[0609] IL-10 is a homodimer that signals through a receptor complex consisting of two IL-10α receptor and two IL-10β receptor subunits, such that the functional cell receptor consists of four IL-10 receptor subunits. IL-10 binding induces STAT3 signaling via the phosphorylation of the cytoplasmic tails of IL-10α receptor and IL-10β receptor by JAK1 and Tyk2, respectively. Exemplary IL-10 protein sequences are provided in Table S6.

TABLE S6
Exemplary IL-10 Polypeptides

| | | SEQ ID |
|---|---|---|
| Name | Sequence | NO. |
| Human IL-10 | MHSSALLCCLVLLTGVRASPGQGT | 466 |
| Full-length | QSENSCTHFPGNLPNMLRDLRDAF | |
| | SRVKTFFQMKDQLDNLLLKESLLE | |
| | DFKGYLGCQALSEMIQFYLEEVMP | |
| | QAENQDPDIKAHVNSLGENLKTLR | |
| | LRLRRCHRFLPCENKSKAVEQVKN | |
| | AFNKLQEKGIYKAMSEFDIFINYI | |
| | EAYMTMKIRN | |
| Human IL-10 | SPGQGTQSENSCTHFPGNLPNMLR | 467 |
| Mature | DLRDAFSRVKTFFQMKDQLDNLLL | |
| | KESLLEDFKGYLGCQALSEMIQFY | |
| | LEEVMPQAENQDPDIKAHVNSLGE | |
| | NLKTLRLRLRRCHRFLPCENKSKA | |
| | VEQVKNAFNKLQEKGIYKAMSEFD | |
| | IFINYIEAYMTMKIRN | |

[0610] Thus, in certain embodiments, an IL-10 protein comprises, consists, or consists essentially of an amino acid sequence selected from Table S6, or an active variant or fragment thereof that is at least 80, 85, 90, 95, 98, or 100% identical to a sequence selected from Table S6. Additional examples of active polypeptide “variants” and “fragments” are described elsewhere herein.

[0611] In some embodiments, an “active” IL-10 polypeptide or fragment or variant is characterized, for example, by its ability to bind to an IL-10α receptor and/or IL-10β receptor protein chain present on the surface of an immune cell in vitro or in vivo, and stimulate downstream signaling activities. Certain exemplary downstream activities include downregulating the expression of Th1 cytokines, MHC class II antigens, and co-stimulatory molecules on macrophages, enhancing B cell survival, proliferation, and antibody production, blocking NF-κB activity, and regulating the JAK-STAT signaling pathway. Certain activities include inhibiting synthesis of pro-inflammatory cytokines such as IFN-γ, IL-2, IL-3, TNFα and GM-CSF made by cells such as macrophages and Th1 T cells, and in some instances inhibiting lipopolysaccharide (LPS) and bacterial product mediated induction of pro-inflammatory cytokines. Thus, in some embodiments, an active IL-10 polypeptide has an anti-inflammatory activity. As noted above, IL-10 can increase anti-cancer immune responses. In some embodiments, an active IL-10 polypeptide has an anti-cancer activity.

[0612] In particular embodiments, the IL-10 polypeptide is a mature form of IL-10, or an active variant or fragment thereof, which comprises, consists, or consists essentially of an amino acid sequence of the mature forms of human IL-10. Certain IL-10 polypeptides thus comprise, consist, or consist essentially of an amino acid sequence that is at least 80, 85, 90, 95, 98, or 100% identical to SEQ ID NO: _ (mature human IL-10). Certain IL-10 polypeptides comprise one or more amino acid substitutions relative to the exemplary amino acid sequences in Table S6.

[0613] Any one or more of the foregoing IL-10 polypeptides can be combined with any of the anti-denatured collagen antibodies (including antigen-binding fragments thereof) and linkers described herein, to generate one or more fusion proteins or larger, multi-chain structures comprising the same.

[0614] Interferon-α (IFN-α). Certain effector domains comprise one or more IFN-α polypeptides. IFN-α is a member of the type I interferon family of immuno-regulatory proteins that bind to the IFN-α cell surface receptor complex. IFN-α polypeptides are produced mainly by plasmacytoid dendritic cells (pDCs), and are primarily involved in regulating innate immunity against viral infection. There are 13 subtypes of IFN-α, encoded by IFNA1, IFNA2, IFNA4, IFNA5, IFNA6, IFNA7, IFNA8, IFNA10, IFNA13, IFNA14, IFNA16, IFNA17, IFNA2. Recombinant IFN-α is used for the treatment of cancer, including hairy cell leukemia, malignant melanoma and AIDS-related Kaposi's sarcoma, venereal or genital warts caused by the Human Papilloma Virus, hepatitis B, and hepatitis C.

[0615] Exemplary IFN-α protein sequences are provided in Table S7.

TABLE S7
Exemplary IFN-α Polypeptides

| | | SEQ ID |
|---|---|---|
| Name | Sequence | NO. |
| Human | MALTFALLVALLVLSCKSSCSVGCDLPQTHSLGSRRTLMLLAQMRKIS | 468 |
| Interferon-α2 | LFSCLKDRHDFGFPQEEFGNQFQKAETIPVLHEMIQQIFNLFSTKDSS | |
| Full-length | AAWDETLLDKFYTELYQQLNDLEACVIQGVGVTETPLMKEDSILAVRK | |
| precursor | YFQRITLYLKEKKYSPCAWEVVRAEIMRSFSLSTNLQESLRSKE | |
| Human | CDLPQTHSLGSRRTLMLLAQMRKISLFSCLKDRHDFGFPQEEFGNQFQ | 469 |
| Interferon-α2 | KAETIPVLHEMIQQIFNLFSTKDSSAAWDETLLDKFYTELYQQLNDLE | |
| Mature | ACVIQGVGVTETPLMKEDSILAVRKYFQRITLYLKEKKYSPCAWEVVR | |
| (24-188) | AEIMRSFSLSTNLQESLRSKE | |
| Interferon | MCDLPQTHSLGNRRALILLAQMRRISPFSCLKDRHDFGFPQEEFDGNQ | 470 |
| alfacon-1 | FQKAQAISVLHEMIQQTFNLFSTKDSSAAWDESLLEKFYTELYQQLND | |
| | LEACVIQEVGVEETPLMNVDSILAVKKYFQRITLYLTEKKYSPCAWEV | |
| | VRAEIMRSFSLSTNLQERLRRKE | |
| alpha-2B | CDLPQTHSLGSRRTLMLLAQMRRISLFSCLKDRHDFGFPQEEFGNQFQ | 471 |
| | KAETIPVLHEMIQQIFNLFSTKDSSAAWDETLLDKFYTELYQQLNDLE | |
| | ACVIQGVGVTETPLMNEDSILAVRKYFQRITLYLKEKKYSPCAWEVVR | |
| | AEIMRSFSLSTNLQESLRSKE | |
| alpha-2c | CDLPQTHSLGSRRTLMLLAQMRRISLFSCLKDRRDFGFPQEEFGNQFQ | 472 |
| | KAETIPVLHEMIQQIFNLFSTKDSSAAWDETLLDKFYTELYQQLNDLE | |
| | ACVIQGVGVTETPLMNEDSILAVRKYFQRITLYLKEKKYSPCAWEVVR | |
| | AEIMRSFSLSTNLQESLRSKE | |

[0616] Thus, in certain embodiments, an IFN-α polypeptide comprises, consists, or consists essentially of an amino acid sequence selected from Table S7, or an active variant or fragment thereof that is at least 80, 85, 90, 95, 98, or 100% identical to a sequence selected from Table S7. Additional examples of active polypeptide “variants” and “fragments” are described elsewhere herein.

[0617] In some embodiments, an “active” IFN-α polypeptide or fragment or variant is characterized, for example, by its ability to bind to an interferon/P receptor present on the surface of an immune cell in vitro or in vivo, and stimulate downstream signaling activities. Certain exemplary downstream activities include upregulating the expression of MHC I proteins, which increases presentation of peptides derived from viral antigens and thereby enhances the activation of CD8+ cytotoxic T cells, inducing antiviral mediators such as 2′-5′ oligoadenylate synthetase (2′-5′ A synthetase) and protein kinase R, and activating Jak (Janus kinase) tyrosine kinases (Jak1 and Tyk2) and Stat1 and Stat2 (signal transducers and activators of transcription). In some embodiments, an IFN-α polypeptide has anti-viral and/or anti-cancer activities. Certain IFNα polypeptides comprise one or more amino acid substitutions relative to the exemplary amino acid sequences in Table S7.

[0618] Any one or more of the foregoing IFNα polypeptides can be combined with any of the anti-denatured collagen antibodies (including antigen-binding fragments thereof) and linkers described herein, to generate one or more fusion proteins or larger, multi-chain structures comprising the same.

[0619] Interleukin-7 (IL-7). Certain effector domains comprise one or more IL-7 polypeptides. IL-7 is a hematopoietic growth factor secreted by stromal cells in the bone marrow and thymus. It is important for proliferation during certain stages of B-cell maturation, and T cell and NK cell survival, development, and homeostasis.

[0620] IL-7 binds to the IL-7 receptor (IL-7R), a heterodimer composed of two subunits, an interleukin-7 receptor-α (CD127) and common-γ chain receptor (CD132). Receptor binding results in a cascade of signals important for T-cell development within the thymus and survival within the periphery, among other activities. IL-7 as an immunotherapy agent has been examined for treatment of various malignancies and during HIV infection. For example, administration of IL-7 in patients with cancer has been shown to transiently disrupt the homeostasis of both CD8+ and CD4+ T cells with a commensurate decrease in the percentage of CD4+CD25+Foxp3+ T regulatory cells. Associated with antiretroviral therapy, IL-7 has been shown to decrease local and systemic inflammations in patients that had incomplete T-cell reconstitution. Exemplary IL-7 protein sequences are provided in Table S8.

TABLE S8
Exemplary IL-7 Polypeptides

| | | SEQ ID |
|---|---|---|
| Name | Sequence | NO. |
| Human IL-7 | MFHVSFRYIFGLPPLILVLLPVASSDCDIEGKDGKQYESVLMVSIDQLL | 473 |
| Full-length | DSMKEIGSNCLNNEFNFFKRHICDANKEGMFLFRAARKLRQFLKMNSTG | |
| | DFDLHLLKVSEGTTILLNCTGQVKGRKPAALGEAQPTKSLEENKSLKEQ | |
| | KKLNDLCFLKRLLQEIKTCWNKILMGTKEH | |
| Human IL-7 | DCDIEGKDGKQYESVLMVSIDQLLDSMKEIGSNCLNNEFNFFKRHICDA | 474 |
| Mature | NKEGMFLFRAARKLRQFLKMNSTGDFDLHLLKVSEGTTILLNCTGQVKG | |
| | RKPAALGEAQPTKSLEENKSLKEQKKLNDLCFLKRLLQEIKTCWNKILM | |
| | GTKEH | |
| Human IL-7 | DCDIEGKDGKQYESVLMVSIDQLLDSMKEIGSNCLNNEFNFFKRHICDA | 475 |
| Mature | NKEGMFLFRAARKLRQFLKMNSTGDFDLHLLKVSEGTTILLNCTGQVKG | |
| E106A | RKPAALGAAQPTKSLEENKSLKEQKKLNDLCFLKRLLQEIKTCWNKILM | |
| | GTKEH | |

[0621] Thus, in certain embodiments, an IL-7 polypeptide comprises, consists, or consists essentially of an amino acid sequence selected from Table S8, or an active variant or fragment thereof that is at least 80, 85, 90, 95, 98, or 100% identical to a sequence selected from Table S8. Additional examples of active polypeptide “variants” and “fragments” are described elsewhere herein.

[0622] In some embodiments, an “active” IL-7 protein or fragment or variant is characterized, for example, by its ability to bind to an IL-7R receptor-α (CD127) or common-γ chain receptor (CD132) chain present on the surface of an immune cell in vitro or in vivo, and stimulate downstream signaling activities. Exemplary downstream signaling activities include stimulating the differentiation of multipotent (pluripotent) hematopoietic stem cells into lymphoid progenitor cells, and stimulating the proliferation of cells in the lymphoid lineage, including B cells, T cells, and NK cells.

[0623] Any one or more of the foregoing IL-7 polypeptides can be combined with any of the anti-denatured collagen antibodies (including antigen-binding fragments thereof) and linkers described herein, to generate one or more fusion proteins or larger, multi-chain structures comprising the same.

[0624] Interleukin-21 (IL-21). Certain effector domains comprise one or more IL-21 polypeptides. Interleukin-21 has potent regulatory effects on cells of the immune system, including NK cells and cytotoxic T cells, for example, by inducing cell division/proliferation in its target cells. IL-21 is expressed in activated human CD4+ T cells and NK T cells, and is also up-regulated in Th2 and Th17 subsets of T helper cells and T follicular cells.

[0625] IL-21 binds to the IL-21 receptor (IL-21R), which is expressed on the surface of T cells, B cells, and NK cells. IL-21R is similar in structure to the receptors for other type I cytokines like IL-2R and IL-15R and requires dimerization with the common gamma chain (γc) in order to bind IL-21. When bound to IL-21, the IL-21R acts through the Jak/STAT pathway, utilizing Jak1 and Jak3 and a STAT3 homodimer to activate its target genes. IL-21 has shown utility in the treatment of cancers, viral infections, and a variety of inflammatory diseases. Exemplary IL-21 amino acid sequences are provided in Table S9.

TABLE S9
Exemplary IL-21 Polypeptides

| | | SEQ ID |
|---|---|---|
| Name | Sequence | NO. |
| Human IL-21 | MRSSPGNMERIVICLMVIFLGTLVHKSSSQGQDRHMIRMRQLIDIVDQL | 476 |
| Full-length | KNYVNDLVPEFLPAPEDVETNCEWSAFSCFQKAQLKSANTGNNERIINV | |
| | SIKKLKRKPPSTNAGRRQKHRLTCPSCDSYEKKPPKEFLERFKSLLQKM | |
| | IHQHLSSRTHGSEDS | |
| Human IL-21 | HKSSSQGQDRHMIRMRQLIDIVDQLKNYVNDLVPEFLPAPEDVETNCEW | 477 |
| Mature | SAFSCFQKAQLKSANTGNNERIINVSIKKLKRKPPSTNAGRRQKHRLTC | |
| | PSCDSYEKKPPKEFLERFKSLLQKMIHQHLSSRTHGSEDS | |
| Human IL-21 | GQDRHMIRMRQLIDIVDQLKNYVNDLVPEFLPAPEDVETNCEWSAFSCF | 478 |
| (31-162) | QKAQLKSANTGNNERIINVSIKKLKRKPPSTNAGRRQKHRLTCPSCDSY | |
| | EKKPPKEFLERFKSLLQKMIHQHLSSRTHGSEDS | |

[0626] Thus, in certain embodiments, an IL-21 polypeptide comprises, consists, or consists essentially of an amino acid sequence selected from Table S9, or an active variant or fragment thereof that is at least 80, 85, 90, 95, 98, or 100% identical to a sequence selected from Table S9. Additional examples of active polypeptide “variants” and “fragments” are described elsewhere herein.

[0627] In some embodiments, an “active” IL-21 protein or fragment or variant is characterized, for example, by its ability to bind to an IL-21R chain present on the surface of an immune cell in vitro or in vivo, and stimulate downstream signaling activities. Exemplary downstream signaling activities include inducing cell division/proliferation of NK cells and cytotoxic T cells.

[0628] Any one or more of the foregoing IL-21 polypeptides can be combined with any of the anti-denatured collagen antibodies (including antigen-binding fragments thereof) and linkers described herein, to generate one or more fusion proteins or larger, multi-chain structures comprising the same.

[0629] Immunomodulatory or Anti-Cancer Antibodies. In certain embodiments, an effector domain comprises an immunomodulatory antibody, or antigen-binding fragment thereof, for example, to create a bi-specific or multi-specific antibody. In some instances, an effector domain comprises an anti-cancer antibody, or antigen-binding fragment thereof. Examples of immunomodulatory antibodies, or antigen-binding fragments thereof, include “antagonists” of an immune-inhibitory receptor, and “agonists” of an immune-stimulatory receptor.

[0630] In some instances, the antibody, or antigen-binding fragment thereof, binds to a therapeutically-relevant antigen, such as an immunomodulatory or cancer antigen or receptor.

[0631] Exemplary antigens or receptors are selected from one or more of human Her2/neu, Her1/EGF receptor (EGFR), EGFR1, EGFR2, EGFR3, Her3, A33 antigen, B7H3, B7H4, CD3, CD4, CD5, CD8, CD16, CD19, CD20, CD30, CD22, CD23 (IgE Receptor), B-cell maturation antigen (BCMA), Trop-2, Claudin 6, claudin 16, MAGE-3, C242 antigen, 5T4, IL-6, IL-13, PD-1, CTLA-4, PD-L1, TIGIT, TIM-3, LAG-3, 4-1BB, vascular endothelial growth factor VEGF (e.g., VEGF-A) VEGFR-1, VEGFR-2, CD27, CD28, CD33, CD37, CD40, CD44, CD51, CD52, CD56, CD74, CD80, CD86, CD137, CD152, CD200, CD221, CCR4, HLA-DR, CTLA-4, NPC-1C, Siglec15, MIC-A, NKG2A, NKG2D, Nkp30, NKp46, tenascin, vimentin, insulin-like growth factor 1 receptor (IGF-1R), alpha-fetoprotein, insulin-like growth factor 1 (IGF-1), carbonic anhydrase 9 (CA-IX), carcinoembryonic antigen (CEA), guanylyl cyclase C, NY-ESO-1, p53, survivin, integrin αvβ3, integrin α5β1, folate receptor 1, transmembrane glycoprotein NMB, fibroblast activation protein alpha (FAP), glycoprotein 75, TAG-72, MUC1, MUC16 (or CA-125), phosphatidylserine, prostate-specific membrane antigen (PSMA), NR-LU-13 antigen, SLAM family member 7 (SLAMF7), EGP40 pancarcinoma antigen, B-cell activating factor (BAFF), platelet-derived growth factor receptor, glycoprotein EpCAM (17-1A), Programmed Death-1, protein disulfide isomerase (PDI), Phosphatase of Regenerating Liver 3 (PRL-3), prostatic acid phosphatase, Lewis-Y antigen, GD2 (a disialoganglioside expressed on tumors of neuroectodermal origin), glypican-3 (GPC3), and mesothelin. Exemplary antibodies to such antigens or receptors are known and available in the art.

[0632] In specific embodiments, the immunomodulatory or anti-cancer antibody, or antigen-binding fragment thereof, specifically binds to human CD40 (see Table S10). In some embodiments, the antibody, or antigen-binding fragment thereof, specifically binds to a TNF superfamily receptor (selected, for example, from Table T1), such as human 4-1BB (see Table S10).

[0633] Any one or more of the foregoing immunomodulatory or anti-cancer antibodies can be combined with any of the anti-denatured collagen antibodies (including antigen-binding fragments thereof) and linkers described herein, to generate one or more fusion proteins or larger, multi-chain structures comprising the same.

[0634] Linkers. As noted above, in certain embodiments, a fusion protein comprises a linker or a peptide linker, including a flexible linker. In some embodiments, the linker is a cleavable linker, for example, a cleavable linker that comprises a protease cleavage site. In some embodiments, the linker is a non-cleavable linker, that is, a physiologically-stable linker, or a stable linker.

[0635] In some embodiments, the linker is about 1-50 1-40, 1-30, 1-20, 1-10, 1-5, 1-4, 1-3 amino acids in length, or about 1, 2, 3, 4, 5, 6, 7, 8, 9, 10, 11, 12, 13, 14, 15, 16, 17, 18, 19, 20, 21, 22, 23, 24, 25, 26, 27, 28, 29, 30, 31, 32, 33, 34, 35, 36, 37, 38, 39, 40, 41, 42, 43, 44, 45, 46, 47, 48, 49, 50 amino acids in length. In particular embodiments, the first linker is a cleavable linker, and the second linker is a non-cleavable or stable linker. In some embodiments, the first linker is a non-cleavable or stable linker, and the second linker is a cleavable linker. In some embodiments, the linker facilitates exposure of the effector domain under suitable conditions, for example, in the presence of denatured human collagen in diseased or cancerous tissue, as described herein.

[0636] In some embodiments, a cleavable linker comprises at least one protease cleavage site, or is a low pH-sensitive linker. Suitable protease cleavages sites and self-cleaving peptides are known to the skilled person (see, e.g., Ryan et al., J. Gener. Virol. 78:699-722, 1997; and Scymczak et al., Nature Biotech. 5:589-594, 2004). In some embodiments, the protease cleavage site is cleavable by a protease selected from one or more of a metalloprotease, a serine protease, a cysteine protease, and an aspartic acid protease. In particular embodiments, the protease cleavage site is cleavable by a protease selected from one or more of MMP1, MMP2, MMP3, MMP4, MMP5, MMP6, MMP7, MMP8, MMP9, MMP10, MMP11, MMP12, MMP13, MMP14, TEV protease, matriptase, uPA, FAP, Legumain, PSA, Kallikrein, Cathepsin A, and Cathepsin B.

[0637] Exemplary stable linker sequences, including flexible linkers, are provided in Table L1.

TABLE L1
Exemplary stable linkers

| | | SEQ ID |
|---|---|---|
| Name | Sequence | NO: |
| | [G]ₓ | |
| | [S]ₓ | |
| | [N]ₓ | |
| | [GS]ₓ | |
| | [GGS]ₓ | |
| | [GSS]ₓ | |
| | [GSGS]ₓ | 479 |
| | [GGSG]ₓ | 480 |
| | [GGGS]ₓ | 481 |
| | [GSGGG]ₓ | 482 |
| | [GGGGS]ₓ | 483 |
| | [GN]ₓ | |
| | [GGN]ₓ | |
| | [GNN]ₓ | |
| | [GNGN]ₓ | 484 |
| | [GGNG]ₓ | 485 |
| | [GGGN]ₓ | 486 |
| | [GGGGN]ₓ | 487 |
| | DGGGS | 488 |
| | TGEKP | 489 |
| | GGRR | 490 |
| | EGKSSGSGSESKVD | 491 |
| | KESGSVSSEQLAQFRSLD | 492 |
| | GGRRGGGS | 493 |
| | LRQRDGERP | 494 |
| | LRQKDGGGSERP | 495 |
| | LRQKD(GGGS)₂ERP | 496 |

where x is 1, 2, 3, 4, 5, 6, 7, 8, 9, 10, 11, 12, 13, 14, 15, 16, 17, 18, 19, or 20

[0638] Thus, in certain embodiment, a stable and/or flexible linker is selected from Table L1. In particular embodiments, flexible linkers can be rationally designed using a computer program capable of modeling both DNA-binding sites and the peptides themselves (Desjarlais & Berg, PNAS. 90:2256-2260, 1993; and PNAS. 91:11099-11103, 1994) or by phage display methods.

[0639] Exemplary cleavable linker sequences are provided in Table L2.

TABLE L2
Exemplary cleavable linkers

| | | SEQ ID |
|---|---|---|
| Name | Sequence | NO: |
| | PLGLAG | 497 |
| | SGRSDNR | 498 |
| | PLGLAGSGRSDNR | 499 |
| | GSLSGRSDNHGS | 500 |
| | LGGSGRSANA | 501 |
| | LSGRSANAG | 502 |
| | GPLGLAGRSANA | 503 |
| | PLGLSGRSANAGPA | 504 |
| | PLGLAGRSANAGPA | 505 |
| | GPLGLSGRSANAGPASG | 506 |
| | GPLGLAGRSANAGPASG | 507 |
| | SGPLGLAGRSANAGPAS | 508 |
| | SGPASGRSANAPLGLAG | 509 |
| | GPASGRSANAPLGLAGS | 510 |
| | GPLGLAGRSANPGPASG | 511 |
| | GPLGLAGRSDNHGPASG | 512 |
| | GPLGLAGRSDNPGPASG | 513 |
| | GPLGLAGRSENPGPASG | 514 |
| | GPLGLAGRSDNLGPASG | 515 |
| | GPLGLAGRNAQVGPASG | 516 |
| | LSGRSDNA | 517 |
| | LSGRSDND | 518 |
| | LSGRSDNE | 519 |
| | LSGRSDNF | 520 |
| | LSGRSDNG | 521 |
| | LSGRSDNI | 522 |
| | LSGRSDNK | 523 |
| | LSGRSDNL | 524 |
| | LSGRSDNM | 525 |
| | LSGRSDNN | 526 |
| | LSGRSDNP | 527 |
| | LSGRSDNQ | 528 |
| | LSGRSDNR | 529 |
| | LSGRSDNS | 530 |
| | LSGRSDNT | 531 |
| | LSGRSDNV | 532 |
| | LSGRSDNW | 533 |
| | LSGRSDNY | 534 |
| | LSGRSAND | 535 |
| | LSGRSANE | 536 |
| | LSGRSANF | 537 |
| | LSGRSANG | 538 |
| | LSGRSANH | 539 |
| | LSGRSANI | 540 |
| | LSGRSANK | 541 |
| | LSGRSANL | 542 |
| | LSGRSANM | 543 |
| | LSGRSANN | 544 |
| | LSGRSANP | 545 |
| | LSGRSANQ | 546 |
| | LSGRSANR | 547 |
| | LSGRSANS | 548 |
| | LSGRSANT | 549 |
| | LSGRSANV | 550 |
| | LSGRSANW | 551 |
| | LSGRSANY | 552 |
| | PLGLAGRSDNHS | 553 |
| | PLGLAGSGRSDNRGA | 554 |
| | PLGLAGSGRSDNQGA | 555 |
| | PLGLAGSGRSDNYGA | 556 |
| | GPLGLAGSGRSDNQG | 557 |
| | PLGLAGSGRSDNQ | 558 |
| | PLGLAGSGRSDNH | 559 |
| | PLGLAGSGRSDNT | 560 |
| | SGRSDNH | 561 |

[0640] Thus, in certain embodiment, a cleavable linker is selected from Table L2. In particular embodiments, a cleavable linker has a half life at pH 7.4, 25° C., for example, at physiological pH, human body temperature (e.g., in vivo, in serum, in a given tissue), of about or less than about 30 minutes, 1 hour, 2 hours, 3 hours, 4 hours, 5 hours, 6 hours, 12 hours, 18 hours, 24 hours, 36 hours, 48 hours, 72 hours, or 96 hours, or any intervening half-life.

[0641] Any one or more of the foregoing linkers can be any of the anti-denatured collagen antibodies (including antigen-binding fragments thereof) and effector domains described herein, to generate one or more fusion proteins or larger, multi-chain structures comprising the same.

[0642] Additional Domains. Certain fusion proteins comprise one or more additional domains, for example, binding domains. In some embodiments, each of polypeptides in a fusion protein further comprise one or more protein domains at a free terminus.

[0643] In particular embodiments, the protein domains are selected from one or more of cell receptor targeting moieties optionally bi-specific targeting moieties, antigen-binding domains optionally bi-specific antigen-binding domains, cell membrane receptor extracellular domains (ECDs), Fc domains, human serum albumin (HSA), Fc binding domains, HSA binding domains, cytokines, chemokines, and soluble protein ligands.

[0644] In some embodiments, the one or more additional protein domains can be used to form complexes of two, three, four, five, or more fusion proteins, which are bound to together via the additional domain(s).

[0645] Exemplary fusion proteins, including bi-specific antibodies, are provided in Table S10.

TABLE S10
Exemplary Fusion Proteins and Bi-Specific Antibodies

| | | |
|---|---|---|
| | | SEQ ID |
| Chain Name | Sequence | NO: |

P27992713 - Fusion to proIL-2

| | | |
|---|---|---|
| Chains 1 | QVTLKESGPALVKPTQTLTLTCTFSGFSLSTSGMGVGWIRQPPGKALEWLAD | 562 |
| and 2 | IWWDDNKYANPSLKSRLTISKDTSKNQVVLTMTNMDPVDTATYYCARRANYG | |
| hB7_IgG1(AAA)_ | NPYYAQDYWGQGTTVTVSSASTKGPSVFPLAPSSKSTSGGTAALGCLVKDYF | |
| delK- | PEPVTVSWNSGALTSGVHTFPAVLQSSGLYSLSSVVTVPSSSLGTQTYICNV | |
| GGSPLGLAGG | NHKPSNTKVDKKVEPKSCDKTHTCPPCPAPEAAGGPSVFLFPPKPKDTLMIS | |
| GS-GG- | RTPEVTCVVVDVSHEDPEVKFNWYVDGVEVHNAKTKPREEQYNSTYRVVSVL | |
| L_wt_del_ | TVLHQDWLNGKEYKCKVSNKALAAPIEKTISKAKGQPREPQVYTLPPSRDEL | |
| APASS_K35E_ | TKNQVSLTCLVKGFYPSDIAVEWESNGQPENNYKTTPPVLDSDGSFFLYSKL | |
| F42A_D10- | TVDKSRWQQGNVFSCSVMHEALHNHYTQKSLSLSPG [symbol] ST | |
| GGSGG- | KKTQLQLEHLLLDLQMILNGINNYKNPELTRMLTAKFYMPKKATELKHLQCL | |
| PLGLAG- | EEELKPLEEVLNLAHSKNFHFDPRDVVSNINVFVLELKGSETTFMCEYADET | |
| SGRSDNR- | ATIVEFLNRWITFSQSIISTLT [symbol] [symbol] ELCDDDPPE | |
| GGA-R | IPHATFKAMAYKEGTMLNCECKRGFRRIKSGSLYMLCTGNSSHSSWDNQCQC | |
| 14/21R | TSSATRNTTKQVTPQPEEQKERKTTEMQSPMQPVDQASLPGHCREPPPWENE | |
| | ATERIYHFVVGQMVYYQCVQGYRALHRGPAESVCKMTHGKTRWTQPQLICTG | |
| | E | |
| Chains 3 | DIVMTQTPLSLPVTPGEPASISCRSSQSIVHSNGNTYLEWYLQKPGQSPQLL | 563 |
| and 4 | IYKVSNRFSGVPDRFSGSGSGTDFTLKISRVEAEDVGVYYCFQGSHVPWTFG | |
| hB7_IgkLC | QGTKVEIKRTVAAPSVFIFPPSDEQLKSGTASVVCLLNNFYPREAKVQWKVD | |
| | NALQSGNSQESVTEQDSKDSTYSLSSTLTLSKADYEKHKVYACEVTHQGLSS | |
| | PVTKSFNRGEC | |

P28002713 - Fusion to proIL-2

| | | |
|---|---|---|
| Chains 1 | QVTLKESGPALVKPTQTLTLTCTFSGFSLSTSGMGVGWIRQPPGKALEWLAD | 564 |
| and 2 | IWWDDNKYANPSLKSRLTISKDTSKNQVVLTMTNMDPVDTATYYCARRANYG | |
| hB7_IgG1(AAA)_ | NPYYAQDYWGQGTTVTVSSASTKGPSVFPLAPSSKSTSGGTAALGCLVKDYF | |
| delK- | PEPVTVSWNSGALTSGVHTFPAVLQSSGLYSLSSVVTVPSSSLGTQTYICNV | |
| GGSGGSGGSG | NHKPSNTKVDKKVEPKSCDKTHTCPPCPAPEAAGGPSVFLFPPKPKDTLMIS | |
| GS-GG- | RTPEVTCVVVDVSHEDPEVKFNWYVDGVEVHNAKTKPREEQYNSTYRVVSVL | |
| L_wt_del_ | TVLHQDWLNGKEYKCKVSNKALAAPIEKTISKAKGQPREPQVYTLPPSRDEL | |
| APASS_K35E_ | TKNQVSLTCLVKGFYPSDIAVEWESNGQPENNYKTTPPVLDSDGSFFLYSKL | |
| F42A_D10- | TVDKSRWQQGNVFSCSVMHEALHNHYTQKSLSLSPG [symbol] ST | |
| GGSGG- | KKTQLQLEHLLLDLQMILNGINNYKNPELTRMLTAKFYMPKKATELKHLQCL | |
| GGSGGS- | EEELKPLEEVLNLAHSKNFHFDPRDVVSNINVFVLELKGSETTFMCEYADET | |
| GGSGGSG- | ATIVEFLNRWITFSQSIISTLT [symbol] [symbol] ELCDDDPPE | |
| GGA-R | IPHATFKAMAYKEGTMLNCECKRGFRRIKSGSLYMLCTGNSSHSSWDNQCQC | |
| 14/21R | TSSATRNTTKQVTPQPEEQKERKTTEMQSPMQPVDQASLPGHCREPPPWENE | |
| | ATERIYHFVVGQMVYYQCVQGYRALHRGPAESVCKMTHGKTRWTQPQLICTG | |
| | E | |
| Chains 3 | DIVMTQTPLSLPVTPGEPASISCRSSQSIVHSNGNTYLEWYLQKPGQSPQLL | 565 |
| and 4 | IYKVSNRFSGVPDRFSGSGSGTDFTLKISRVEAEDVGVYYCFQGSHVPWTFG | |
| hB7_IgkLC | QGTKVEIKRTVAAPSVFIFPPSDEQLKSGTASVVCLLNNFYPREAKVQWKVD | |
| | NALQSGNSQESVTEQDSKDSTYSLSSTLTLSKADYEKHKVYACEVTHQGLSS | |
| | PVTKSFNRGEC | |

P28012716 - Fusion to proIL-2

| | | |
|---|---|---|
| Chains 1 | QVTLKESGPALVKPTQTLTLTCTFSGFSLSTPGMGVWWIRQPPGKALEWLAD | 566 |
| and 2 | IWWDDNKYTNPSLKSRLTISKDTSKNQVVLTMTNMDPVDTATYYCARRANYG | |
| hD3_IgG1(AAA)_ | NPYYAQDYWGQGTTVTVSSASTKGPSVFPLAPSSKSTSGGTAALGCLVKDYF | |
| delK- | PEPVTVSWNSGALTSGVHTFPAVLQSSGLYSLSSVVTVPSSSLGTQTYICNV | |
| GGSPLGLAGG | NHKPSNTKVDKKVEPKSCDKTHTCPPCPAPEAAGGPSVFLFPPKPKDTLMIS | |
| GS-GG- | RTPEVTCVVVDVSHEDPEVKFNWYVDGVEVHNAKTKPREEQYNSTYRVVSVL | |
| L_wt_del_ | TVLHQDWLNGKEYKCKVSNKALAAPIEKTISKAKGQPREPQVYTLPPSRDEL | |
| APASS_K35E_ | TKNQVSLTCLVKGFYPSDIAVEWESNGQPENNYKTTPPVLDSDGSFFLYSKL | |
| F42A_D10- | TVDKSRWQQGNVFSCSVMHEALHNHYTQKSLSLSPG [symbol] ST | |
| GGSGG- | KKTQLQLEHLLLDLQMILNGINNYKNPELTRMLTAKFYMPKKATELKHLQCL | |
| PLGLAG- | EEELKPLEEVLNLAHSKNFHFDPRDVVSNINVFVLELKGSETTFMCEYADET | |
| SGRSDNR- | ATIVEFLNRWITFSQSIISTLT [symbol] [symbol] ELCDDDPPE | |
| GGA-R | IPHATFKAMAYKEGTMLNCECKRGFRRIKSGSLYMLCTGNSSHSSWDNQCQC | |
| 14/21R | TSSATRNTTKQVTPQPEEQKERKTTEMQSPMQPVDQASLPGHCREPPPWENE | |
| | ATERIYHFVVGQMVYYQCVQGYRALHRGPAESVCKMTHGKTRWTQPQLICTG | |
| | E | |
| Chains 3 | DIVMTQTPLSLPVTPGEPASISCRSSQSIVSSWGNTYLEWYLQKPGQSPQLL | 567 |
| and 4 | IYKVSNRFSGVPDRFSGSGSGTDFTLKISRVEAEDVGVYYCFQGSHVPWTFG | |
| hD3_IgkLC | QGTKVEIKRTVAAPSVFIFPPSDEQLKSGTASVVCLLNNFYPREAKVQWKVD | |
| | NALQSGNSQESVTEQDSKDSTYSLSSTLTLSKADYEKHKVYACEVTHQGLSS | |
| | PVTKSFNRGEC | |

P28012798 - Fusion to proIL-2

| | | |
|---|---|---|
| Chains 1 | QVTLKESGPALVKPTQTLTLTCTFSGFSLSTPGMGVWWIRQPPGKALEWLAD | 568 |
| and 2 | IWWDDNKYTNPSLKSRLTISKDTSKNQVVLTMTNMDPVDTATYYCARRANYG | |
| hD3_IgG1(AAA)_ | NPYYAQDYWGQGTTVTVSSASTKGPSVFPLAPSSKSTSGGTAALGCLVKDYF | |
| delK- | PEPVTVSWNSGALTSGVHTFPAVLQSSGLYSLSSVVTVPSSSLGTQTYICNV | |
| GGSPLGLAGG | NHKPSNTKVDKKVEPKSCDKTHTCPPCPAPEAAGGPSVFLFPPKPKDTLMIS | |
| GS-GG- | RTPEVTCVVVDVSHEDPEVKFNWYVDGVEVHNAKTKPREEQYNSTYRVVSVL | |
| L_wt_del_ | TVLHQDWLNGKEYKCKVSNKALAAPIEKTISKAKGQPREPQVYTLPPSRDEL | |
| APASS_K35E_ | TKNQVSLTCLVKGFYPSDIAVEWESNGQPENNYKTTPPVLDSDGSFFLYSKL | |
| F42A_D10- | TVDKSRWQQGNVFSCSVMHEALHNHYTQKSLSLSPG [symbol] ST | |
| GGSGG- | KKTQLQLEHLLLDLQMILNGINNYKNPELTRMLTAKFYMPKKATELKHLQCL | |
| PLGLAG- | EEELKPLEEVLNLAHSKNFHFDPRDVVSNINVFVLELKGSETTFMCEYADET | |
| SGRSDNR- | ATIVEFLNRWITFSQSIISTLT [symbol] [symbol] ELCDDDPPE | |
| GGA-R | IPHATFKAMAYKEGTMLNCECKRGFRRIKSGSLYMLCTGNSSHSSWDNQCQC | |
| 14/21R | TSSATRNTTKQVTPQPEEQKERKTTEMQSPMQPVDQASLPGHCREPPPWENE | |
| | ATERIYHFVVGQMVYYQCVQGYRALHRGPAESVCKMTHGKTRWTQPQLICTG | |
| | E | |
| Chains 3 | DIVMTQTPLSLPVTPGEPASISCRSSQSIVHSNANTYLEWYLQKPGQSPQLL | 569 |
| and 4 | IYKVSNRFSGVPDRFSGSGSGTDFTLKISRVEAEDVGVYYCFQGSHVPWTFG | |
| hB7A_IgkLC | QGTKVEIKRTVAAPSVFIFPPSDEQLKSGTASVVCLLNNFYPREAKVQWKVD | |
| | NALQSGNSQESVTEQDSKDSTYSLSSTLTLSKADYEKHKVYACEVTHQGLSS | |
| | PVTKSFNRGEC | |

P28022716 - Fusion to proIL-2

| | | |
|---|---|---|
| Chains 1 | QVTLKESGPALVKPTQTLTLTCTFSGFSLSTPGMGVWWIRQPPGKALEWLAD | 570 |
| and 2 | IWWDDNKYTNPSLKSRLTISKDTSKNQVVLTMTNMDPVDTATYYCARRANYG | |
| hD3_IgG1(AAA)_ | NPYYAQDYWGQGTTVTVSSASTKGPSVFPLAPSSKSTSGGTAALGCLVKDYF | |
| delK- | PEPVTVSWNSGALTSGVHTFPAVLQSSGLYSLSSVVTVPSSSLGTQTYICNV | |
| GGSGGSGGSG | NHKPSNTKVDKKVEPKSCDKTHTCPPCPAPEAAGGPSVFLFPPKPKDTLMIS | |
| GS-GG- | RTPEVTCVVVDVSHEDPEVKFNWYVDGVEVHNAKTKPREEQYNSTYRVVSVL | |
| L_wt_del_ | TVLHQDWLNGKEYKCKVSNKALAAPIEKTISKAKGQPREPQVYTLPPSRDEL | |
| APASS_K35E_ | TKNQVSLTCLVKGFYPSDIAVEWESNGQPENNYKTTPPVLDSDGSFFLYSKL | |
| F42A_D10- | TVDKSRWQQGNVFSCSVMHEALHNHYTQKSLSLSPG [symbol] T | |
| GGSGG- | KKTQLQLEHLLLDLQMILNGINNYKNPELTRMLTAKFYMPKKATELKHLQCL | |
| GGSGGS- | EEELKPLEEVLNLAHSKNFHFDPRDVVSNINVFVLELKGSETTFMCEYADET | |
| GGSGGSG- | ATIVEFLNRWITFSQSIISTLT [symbol] [symbol] ELCDDDPPE | |
| GGA-R | IPHATFKAMAYKEGTMLNCECKRGFRRIKSGSLYMLCTGNSSHSSWDNQCQC | |
| 14/21R | TSSATRNTTKQVTPQPEEQKERKTTEMQSPMQPVDQASLPGHCREPPPWENE | |
| | ATERIYHFVVGQMVYYQCVQGYRALHRGPAESVCKMTHGKTRWTQPQLICTG | |
| | E | |
| Chains 3 | DIVMTQTPLSLPVTPGEPASISCRSSQSIVSSWGNTYLEWYLQKPGQSPQLL | 571 |
| and 4 | IYKVSNRFSGVPDRFSGSGSGTDFTLKISRVEAEDVGVYYCFQGSHVPWTFG | |
| hD3_IgkLC | QGTKVEIKRTVAAPSVFIFPPSDEQLKSGTASVVCLLNNFYPREAKVQWKVD | |
| | NALQSGNSQESVTEQDSKDSTYSLSSTLTLSKADYEKHKVYACEVTHQGLSS | |
| | PVTKSFNRGEC | |

P28052797 - Fusion to proIL-2

| | | |
|---|---|---|
| Chains 1 | QVTLKESGPALVKPTQTLTLTCTFSGFSLSTSGMGVGWIRQPPGKALEWLAD | 572 |
| and 2 | IWWDDNKYANPSLKSRLTISKDTSKNQVVLTMTNMDPVDTATYYCARRANYG | |
| hB7_IgG1(AAA)_ | NPYYAQDYWGQGTTVTVSSASTKGPSVFPLAPSSKSTSGGTAALGCLVKDYF | |
| delK- | PEPVTVSWNSGALTSGVHTFPAVLQSSGLYSLSSVVTVPSSSLGTQTYICNV | |
| GGSPLGLAGG | NHKPSNTKVDKKVEPKSCDKTHTCPPCPAPEAAGGPSVFLFPPKPKDTLMIS | |
| GS-GG- | RTPEVTCVVVDVSHEDPEVKFNWYVDGVEVHNAKTKPREEQYNSTYRVVSVL | |
| L_wt_del_ | TVLHQDWLNGKEYKCKVSNKALAAPIEKTISKAKGQPREPQVYTLPPSRDEL | |
| APASS_F42A_ | TKNQVSLTCLVKGFYPSDIAVEWESNGQPENNYKTTPPVLDSDGSFFLYSKL | |
| K43E_E61K- | TVDKSRWQQGNVFSCSVMHEALHNHYTQKSLSLSPG [symbol] | |
| GGSGG- | STKKTQLQLEHLLLDLQMILNGINNYKNPKLTRMLTAEFYMPKKATELKHLQ | |
| PLGLAG- | CLEKELKPLEEVLNLAQSKNFHLRPRDLISNINVIVLELKGSETTFMCEYAD | |
| SGRSDNR- | ETATIVEFLNRWITFSQSIISTLT [symbol] [symbol] ELCDDDP | |
| GGA- | PEIPHATFKAMAYKEGTMLNCKCKRGFRRIESGSLYMLCTGNSSHSSWDNQC | |
| R_E29K_K38E | QCTSSATRNTTKQVTPQPEEQKERKTTEMQSPMQPVDQASLPGHCREPPPWE | |
| 14/21R | NEATERIYHFVVGQMVYYQCVQGYRALHRGPAESVCKMTHGKTRWTQPQLIC | |
| | TGE | |
| Chains 3 | DIVMTQTPLSLPVTPGEPASISCRSSQSIVHSSGNTYLEWYLQKPGQSPQLL | 573 |
| and 4 | IYKVSNRFSGVPDRFSGSGSGTDFTLKISRVEAEDVGVYYCFQGSHVPWTFG | |
| hB7S_IgkLC | QGTKVEIKRTVAAPSVFIFPPSDEQLKSGTASVVCLLNNFYPREAKVQWKVD | |
| | NALQSGNSQESVTEQDSKDSTYSLSSTLTLSKADYEKHKVYACEVTHQGLSS | |
| | PVTKSFNRGEC | |

P28052798 - Fusion to proIL-2

| | | |
|---|---|---|
| Chains 1 | QVTLKESGPALVKPTQTLTLTCTFSGFSLSTSGMGVGWIRQPPGKALEWLAD | 574 |
| and 2 | IWWDDNKYANPSLKSRLTISKDTSKNQVVLTMTNMDPVDTATYYCARRANYG | |
| hB7_IgG1(AAA)_ | NPYYAQDYWGQGTTVTVSSASTKGPSVFPLAPSSKSTSGGTAALGCLVKDYF | |
| delK- | PEPVTVSWNSGALTSGVHTFPAVLQSSGLYSLSSVVTVPSSSLGTQTYICNV | |
| GGSPLGLAGG | NHKPSNTKVDKKVEPKSCDKTHTCPPCPAPEAAGGPSVFLFPPKPKDTLMIS | |
| GS-GG- | RTPEVTCVVVDVSHEDPEVKFNWYVDGVEVHNAKTKPREEQYNSTYRVVSVL | |
| L_wt_del_ | TVLHQDWLNGKEYKCKVSNKALAAPIEKTISKAKGQPREPQVYTLPPSRDEL | |
| APASS_F42A_ | TKNQVSLTCLVKGFYPSDIAVEWESNGQPENNYKTTPPVLDSDGSFFLYSKL | |
| K43E_E61K- | TVDKSRWQQGNVFSCSVMHEALHNHYTQKSLSLSPG [symbol] | |
| GGSGG- | STKKTQLQLEHLLLDLQMILNGINNYKNPKLTRMLTAEFYMPKKATELKHLQ | |
| PLGLAG- | CLEKELKPLEEVLNLAQSKNFHLRPRDLISNINVIVLELKGSETTFMCEYAD | |
| SGRSDNR- | ETATIVEFLNRWITFSQSIISTLT [symbol] [symbol] ELCDDDP | |
| GGA- | PEIPHATFKAMAYKEGTMLNCKCKRGFRRIESGSLYMLCTGNSSHSSWDNQC | |
| R_E29K_K38E | QCTSSATRNTTKQVTPQPEEQKERKTTEMQSPMQPVDQASLPGHCREPPPWE | |
| 14/21R | NEATERIYHFVVGQMVYYQCVQGYRALHRGPAESVCKMTHGKTRWTQPQLIC | |
| | TGE | |
| Chains 3 | DIVMTQTPLSLPVTPGEPASISCRSSQSIVHSNANTYLEWYLQKPGQSPQLL | 575 |
| and 4 | IYKVSNRFSGVPDRFSGSGSGTDFTLKISRVEAEDVGVYYCFQGSHVPWTFG | |
| hB7A_IgkLC | QGTKVEIKRTVAAPSVFIFPPSDEQLKSGTASVVCLLNNFYPREAKVQWKVD | |
| | NALQSGNSQESVTEQDSKDSTYSLSSTLTLSKADYEKHKVYACEVTHQGLSS | |
| | PVTKSFNRGEC | |

P28062798 - Fusion to proIL-2

| | | |
|---|---|---|
| Chains 1 | QVTLKESGPALVKPTQTLTLTCTFSGFSLSTSGMGVGWIRQPPGKALEWLAD | 576 |
| and 2 | IWWDDNKYANPSLKSRLTISKDTSKNQVVLTMTNMDPVDTATYYCARRANYG | |
| hB7_IgG1(AAA)_ | NPYYAQDYWGQGTTVTVSSASTKGPSVFPLAPSSKSTSGGTAALGCLVKDYF | |
| delK- | PEPVTVSWNSGALTSGVHTFPAVLQSSGLYSLSSVVTVPSSSLGTQTYICNV | |
| GGSPLGLAGG | NHKPSNTKVDKKVEPKSCDKTHTCPPCPAPEAAGGPSVFLFPPKPKDTLMIS | |
| GS-GG- | RTPEVTCVVVDVSHEDPEVKFNWYVDGVEVHNAKTKPREEQYNSTYRVVSVL | |
| L_wt_del_ | TVLHQDWLNGKEYKCKVSNKALAAPIEKTISKAKGQPREPQVYTLPPSRDEL | |
| APASS_K35E_ | TKNQVSLTCLVKGFYPSDIAVEWESNGQPENNYKTTPPVLDSDGSFFLYSKL | |
| F42A_- | TVDKSRWQQGNVFSCSVMHEALHNHYTQKSLSLSPG [symbol] ST | |
| GGSGG- | KKTQLQLEHLLLDLQMILNGINNYKNPELTRMLTAKFYMPKKATELKHLQCL | |
| PLGLAG- | EEELKPLEEVLNLAQSKNFHLRPRDLISNINVIVLELKGSETTFMCEYADET | |
| SGRSDNR- | ATIVEFLNRWITFSQSIISTLT [symbol] [symbol] ELCDDDPPE | |
| GGA-R | IPHATFKAMAYKEGTMLNCECKRGFRRIKSGSLYMLCTGNSSHSSWDNQCQC | |
| 14/21R | TSSATRNTTKQVTPQPEEQKERKTTEMQSPMQPVDQASLPGHCREPPPWENE | |
| | ATERIYHFVVGQMVYYQCVQGYRALHRGPAESVCKMTHGKTRWTQPQLICTG | |
| | E | |
| Chains 3 | DIVMTQTPLSLPVTPGEPASISCRSSQSIVHSNANTYLEWYLQKPGQSPQLL | 577 |
| and 4 | TYKVSNRFSGVPDRFSGSGSGTDFTLKISRVEAEDVGVYYCFQGSHVPWTFG | |
| hB7A_IgkLC | QGTKVEIKRTVAAPSVFIFPPSDEQLKSGTASVVCLLNNFYPREAKVQWKVD | |
| | NALQSGNSQESVTEQDSKDSTYSLSSTLTLSKADYEKHKVYACEVTHQGLSS | |
| | PVTKSFNRGEC | |

P28072798 - Fusion to proIL-2

| | | |
|---|---|---|
| Chains 1 | QVTLKESGPALVKPTQTLTLTCTFSGFSLSTSGMGVGWIRQPPGKALEWLAD | 578 |
| and 2 | IWWDDNKYANPSLKSRLTISKDTSKNQVVLTMTNMDPVDTATYYCARRANYG | |
| hB7_IgG1(AAA)_ | NPYYAQDYWGQGTTVTVSSASTKGPSVFPLAPSSKSTSGGTAALGCLVKDYF | |
| delK- | PEPVTVSWNSGALTSGVHTFPAVLQSSGLYSLSSVVTVPSSSLGTQTYICNV | |
| GGSPLGLAGG | NHKPSNTKVDKKVEPKSCDKTHTCPPCPAPEAAGGPSVFLFPPKPKDTLMIS | |
| GS-GG- | RTPEVTCVVVDVSHEDPEVKFNWYVDGVEVHNAKTKPREEQYNSTYRVVSVL | |
| L_wt_del_ | TVLHQDWLNGKEYKCKVSNKALAAPIEKTISKAKGQPREPQVYTLPPSRDEL | |
| APASS_K35E_ | TKNQVSLTCLVKGFYPSDIAVEWESNGQPENNYKTTPPVLDSDGSFFLYSKL | |
| F42A_Y45A- | TVDKSRWQQGNVFSCSVMHEALHNHYTQKSLSLSPG [symbol] ST | |
| GGSGG- | KKTQLQLEHLLLDLQMILNGINNYKNPELTRMLTAKFAMPKKATELKHLQCL | |
| PLGLAG- | EEELKPLEEVLNLAQSKNFHLRPRDLISNINVIVLELKGSETTFMCEYADET | |
| SGRSDNR- | ATIVEFLNRWITFSQSIISTLT [symbol] [symbol] ELCDDDPPE | |
| GGA-R | IPHATFKAMAYKEGTMLNCECKRGFRRIKSGSLYMLCTGNSSHSSWDNQCQC | |
| 14/21R | TSSATRNTTKQVTPQPEEQKERKTTEMQSPMQPVDQASLPGHCREPPPWENE | |
| | ATERIYHFVVGQMVYYQCVQGYRALHRGPAESVCKMTHGKTRWTQPQLICTG | |
| | E | |
| Chains 3 | DIVMTQTPLSLPVTPGEPASISCRSSQSIVHSNANTYLEWYLQKPGQSPQLL | 579 |
| and 4 | IYKVSNRFSGVPDRFSGSGSGTDFTLKISRVEAEDVGVYYCFQGSHVPWTFG | |
| hB7A_IgkLC | QGTKVEIKRTVAAPSVFIFPPSDEQLKSGTASVVCLLNNFYPREAKVQWKVD | |
| | NALQSGNSQESVTEQDSKDSTYSLSSTLTLSKADYEKHKVYACEVTHQGLSS | |
| | PVTKSFNRGEC | |

P28082714 - Fusion to proIL-2

| | | |
|---|---|---|
| Chains 1 | QVTLKESGPALVKPTQTLTLTCTFSGFSLSTPGMGVWWIRQPPGKALEWLAD | 580 |
| and 2 | IWWDDNKYTNPSLKSRLTISKDTSKNQVVLTMTNMDPVDTATYYCARRANYG | |
| hD3_IgG1(AAA)_ | NPYYAQDYWGQGTTVTVSSASTKGPSVFPLAPSSKSTSGGTAALGCLVKDYF | |
| delK- | PEPVTVSWNSGALTSGVHTFPAVLQSSGLYSLSSVVTVPSSSLGTQTYICNV | |
| GGSPLGLAGG | NHKPSNTKVDKKVEPKSCDKTHTCPPCPAPEAAGGPSVFLFPPKPKDTLMIS | |
| GS-GG- | RTPEVTCVVVDVSHEDPEVKFNWYVDGVEVHNAKTKPREEQYNSTYRVVSVL | |
| L_wt_del_ | TVLHQDWLNGKEYKCKVSNKALAAPIEKTISKAKGQPREPQVYTLPPSRDEL | |
| APASS_F42A_ | TKNQVSLTCLVKGFYPSDIAVEWESNGQPENNYKTTPPVLDSDGSFFLYSKL | |
| K43E_E61K- | TVDKSRWQQGNVFSCSVMHEALHNHYTQKSLSLSPG [symbol] | |
| GGSGG- | STKKTQLQLEHLLLDLQMILNGINNYKNPKLTRMLTAEFYMPKKATELKHLQ | |
| PLGLAG- | CLEKELKPLEEVLNLAQSKNFHLRPRDLISNINVIVLELKGSETTFMCEYAD | |
| SGRSDNR- | ETATIVEFLNRWITFSQSIISTLT [symbol] [symbol] ELCDDDP | |
| GGA- | PEIPHATFKAMAYKEGTMLNCKCKRGFRRIESGSLYMLCTGNSSHSSWDNQC | |
| R_E29K_K38E | QCTSSATRNTTKQVTPQPEEQKERKTTEMQSPMQPVDQASLPGHCREPPPWE | |
| 14/21R | NEATERIYHFVVGQMVYYQCVQGYRALHRGPAESVCKMTHGKTRWTQPQLIC | |
| | TGE | |
| Chains 3 | DIVMTQTPLSLPVTPGEPASISCRSSQSIVHSQGNTYLEWYLQKPGQSPQLL | 581 |
| and 4 | IYKVSNRFSGVPDRFSGSGSGTDFTLKISRVEAEDVGVYYCFQGSHVPWTFG | |
| hB7Q_IgkLC | QGTKVEIKRTVAAPSVFIFPPSDEQLKSGTASVVCLLNNFYPREAKVQWKVD | |
| | NALQSGNSQESVTEQDSKDSTYSLSSTLTLSKADYEKHKVYACEVTHQGLSS | |
| | PVTKSFNRGEC | |

P28082716 - Fusion to proIL-2

| | | |
|---|---|---|
| Chains 1 | QVTLKESGPALVKPTQTLTLTCTFSGFSLSTPGMGVWWIRQPPGKALEWLAD | 582 |
| and 2 | IWWDDNKYTNPSLKSRLTISKDTSKNQVVLTMTNMDPVDTATYYCARRANYG | |
| hD3_IgG1(AAA)_ | NPYYAQDYWGQGTTVTVSSASTKGPSVFPLAPSSKSTSGGTAALGCLVKDYF | |
| delK- | PEPVTVSWNSGALTSGVHTFPAVLQSSGLYSLSSVVTVPSSSLGTQTYICNV | |
| GGSPLGLAGG | NHKPSNTKVDKKVEPKSCDKTHTCPPCPAPEAAGGPSVFLFPPKPKDTLMIS | |
| GS-GG- | RTPEVTCVVVDVSHEDPEVKFNWYVDGVEVHNAKTKPREEQYNSTYRVVSVL | |
| L_wt_del_ | TVLHQDWLNGKEYKCKVSNKALAAPIEKTISKAKGQPREPQVYTLPPSRDEL | |
| APASS_F42A_ | TKNQVSLTCLVKGFYPSDIAVEWESNGQPENNYKTTPPVLDSDGSFFLYSKL | |
| K43E_E61K- | TVDKSRWQQGNVFSCSVMHEALHNHYTQKSLSLSPG [symbol] | |
| GGSGG- | STKKTQLQLEHLLLDLQMILNGINNYKNPKLTRMLTAEFYMPKKATELKHLQ | |
| PLGLAG- | CLEKELKPLEEVLNLAQSKNFHLRPRDLISNINVIVLELKGSETTFMCEYAD | |
| SGRSDNR- | ETATIVEFLNRWITFSQSIISTLT [symbol] [symbol] ELCDDDP | |
| GGA- | PEIPHATFKAMAYKEGTMLNCKCKRGFRRIESGSLYMLCTGNSSHSSWDNQC | |
| R_E29K_K38E | QCTSSATRNTTKQVTPQPEEQKERKTTEMQSPMQPVDQASLPGHCREPPPWE | |
| 14/21R | NEATERIYHFVVGQMVYYQCVQGYRALHRGPAESVCKMTHGKTRWTQPQLIC | |
| | TGE | |
| Chains 3 | DIVMTQTPLSLPVTPGEPASISCRSSQSIVSSWGNTYLEWYLQKPGQSPQLL | 583 |
| and 4 | TYKVSNRFSGVPDRFSGSGSGTDFTLKISRVEAEDVGVYYCFQGSHVPWTFG | |
| hD3_IgkLC | QGTKVEIKRTVAAPSVFIFPPSDEQLKSGTASVVCLLNNFYPREAKVQWKVD | |
| | NALQSGNSQESVTEQDSKDSTYSLSSTLTLSKADYEKHKVYACEVTHQGLSS | |
| | PVTKSFNRGEC | |

P28082797 - Fusion to proIL-2

| | | |
|---|---|---|
| Chains 1 | QVTLKESGPALVKPTQTLTLTCTFSGFSLSTPGMGVWWIRQPPGKALEWLAD | 584 |
| and 2 | IWWDDNKYTNPSLKSRLTISKDTSKNQVVLTMTNMDPVDTATYYCARRANYG | |
| hD3_IgG1(AAA)_ | NPYYAQDYWGQGTTVTVSSASTKGPSVFPLAPSSKSTSGGTAALGCLVKDYF | |
| delK- | PEPVTVSWNSGALTSGVHTFPAVLQSSGLYSLSSVVTVPSSSLGTQTYICNV | |
| GGSPLGLAGG | NHKPSNTKVDKKVEPKSCDKTHTCPPCPAPEAAGGPSVFLFPPKPKDTLMIS | |
| GS-GG- | RTPEVTCVVVDVSHEDPEVKFNWYVDGVEVHNAKTKPREEQYNSTYRVVSVL | |
| L_wt_del_ | TVLHQDWLNGKEYKCKVSNKALAAPIEKTISKAKGQPREPQVYTLPPSRDEL | |
| APASS_F42A_ | TKNQVSLTCLVKGFYPSDIAVEWESNGQPENNYKTTPPVLDSDGSFFLYSKL | |
| K43E_E61K- | TVDKSRWQQGNVFSCSVMHEALHNHYTQKSLSLSPG [symbol] | |
| GGSGG- | STKKTQLQLEHLLLDLQMILNGINNYKNPKLTRMLTAEFYMPKKATELKHLQ | |
| PLGLAG- | CLEKELKPLEEVLNLAQSKNFHLRPRDLISNINVIVLELKGSETTFMCEYAD | |
| SGRSDNR- | ETATIVEFLNRWITFSQSIISTLT [symbol] [symbol] ELCDDDP | |
| GGA- | PEIPHATFKAMAYKEGTMLNCKCKRGFRRIESGSLYMLCTGNSSHSSWDNQC | |
| R_E29K_K38E | QCTSSATRNTTKQVTPQPEEQKERKTTEMQSPMQPVDQASLPGHCREPPPWE | |
| 14/21R | NEATERIYHFVVGQMVYYQCVQGYRALHRGPAESVCKMTHGKTRWTQPQLIC | |
| | TGE | |
| Chains 3 | DIVMTQTPLSLPVTPGEPASISCRSSQSIVHSSGNTYLEWYLQKPGQSPQLL | 585 |
| and 4 | TYKVSNRFSGVPDRFSGSGSGTDFTLKISRVEAEDVGVYYCFQGSHVPWTFG | |
| hB7S_IgkLC | QGTKVEIKRTVAAPSVFIFPPSDEQLKSGTASVVCLLNNFYPREAKVQWKVD | |
| | NALQSGNSQESVTEQDSKDSTYSLSSTLTLSKADYEKHKVYACEVTHQGLSS | |
| | PVTKSFNRGEC | |

P28082798 - Fusion to proIL-2

| | | |
|---|---|---|
| Chains 1 | QVTLKESGPALVKPTQTLTLTCTFSGFSLSTPGMGVWWIRQPPGKALEWLAD | 586 |
| and 2 | IWWDDNKYTNPSLKSRLTISKDTSKNQVVLTMTNMDPVDTATYYCARRANYG | |
| hD3_IgG1(AAA)_ | NPYYAQDYWGQGTTVTVSSASTKGPSVFPLAPSSKSTSGGTAALGCLVKDYF | |
| delK- | PEPVTVSWNSGALTSGVHTFPAVLQSSGLYSLSSVVTVPSSSLGTQTYICNV | |
| GGSPLGLAGG | NHKPSNTKVDKKVEPKSCDKTHTCPPCPAPEAAGGPSVFLFPPKPKDTLMIS | |
| GS-GG- | RTPEVTCVVVDVSHEDPEVKFNWYVDGVEVHNAKTKPREEQYNSTYRVVSVL | |
| L_wt_del_ | TVLHQDWLNGKEYKCKVSNKALAAPIEKTISKAKGQPREPQVYTLPPSRDEL | |
| APASS_F42A_ | TKNQVSLTCLVKGFYPSDIAVEWESNGQPENNYKTTPPVLDSDGSFFLYSKL | |
| K43E_E61K- | TVDKSRWQQGNVFSCSVMHEALHNHYTQKSLSLSPG [symbol] | |
| GGSGG- | STKKTQLQLEHLLLDLQMILNGINNYKNPKLTRMLTAEFYMPKKATELKHLQ | |
| PLGLAG- | CLEKELKPLEEVLNLAQSKNFHLRPRDLISNINVIVLELKGSETTFMCEYAD | |
| SGRSDNR- | ETATIVEFLNRWITFSQSIISTLT [symbol] [symbol] ELCDDDP | |
| GGA- | PEIPHATFKAMAYKEGTMLNCKCKRGFRRIESGSLYMLCTGNSSHSSWDNQC | |
| R_E29K_K38E | QCTSSATRNTTKQVTPQPEEQKERKTTEMQSPMQPVDQASLPGHCREPPPWE | |
| 14/21R | NEATERIYHFVVGQMVYYQCVQGYRALHRGPAESVCKMTHGKTRWTQPQLIC | |
| | TGE | |
| Chains 3 | DIVMTQTPLSLPVTPGEPASISCRSSQSIVHSNANTYLEWYLQKPGQSPQLL | 587 |
| and 4 | IYKVSNRFSGVPDRFSGSGSGTDFTLKISRVEAEDVGVYYCFQGSHVPWTFG | |
| hB7A_IgkLC | QGTKVEIKRTVAAPSVFIFPPSDEQLKSGTASVVCLLNNFYPREAKVQWKVD | |
| | NALQSGNSQESVTEQDSKDSTYSLSSTLTLSKADYEKHKVYACEVTHQGLSS | |
| | PVTKSFNRGEC | |

P28092716 - Fusion to proIL-2

| | | |
|---|---|---|
| Chains 1 | QVTLKESGPALVKPTQTLTLTCTFSGFSLSTPGMGVWWIRQPPGKALEWLAD | 588 |
| and 2 | IWWDDNKYTNPSLKSRLTISKDTSKNQVVLTMTNMDPVDTATYYCARRANYG | |
| hD3_IgG1(AAA)_ | NPYYAQDYWGQGTTVTVSSASTKGPSVFPLAPSSKSTSGGTAALGCLVKDYF | |
| delK- | PEPVTVSWNSGALTSGVHTFPAVLQSSGLYSLSSVVTVPSSSLGTQTYICNV | |
| GGSPLGLAGG | NHKPSNTKVDKKVEPKSCDKTHTCPPCPAPEAAGGPSVFLFPPKPKDTLMIS | |
| GS-GG- | RTPEVTCVVVDVSHEDPEVKFNWYVDGVEVHNAKTKPREEQYNSTYRVVSVL | |
| L_wt_del_ | TVLHQDWLNGKEYKCKVSNKALAAPIEKTISKAKGQPREPQVYTLPPSRDEL | |
| APASS_K35E_ | TKNQVSLTCLVKGFYPSDIAVEWESNGQPENNYKTTPPVLDSDGSFFLYSKL | |
| F42A_- | TVDKSRWQQGNVFSCSVMHEALHNHYTQKSLSLSPG [symbol] ST | |
| GGSGG- | KKTQLQLEHLLLDLQMILNGINNYKNPELTRMLTAKFYMPKKATELKHLQCL | |
| PLGLAG- | EEELKPLEEVLNLAQSKNFHLRPRDLISNINVIVLELKGSETTFMCEYADET | |
| SGRSDNR- | ATIVEFLNRWITFSQSIISTLT [symbol] [symbol] ELCDDDPPE | |
| GGA-R | IPHATFKAMAYKEGTMLNCECKRGFRRIKSGSLYMLCTGNSSHSSWDNQCQC | |
| 14/21R | TSSATRNTTKQVTPQPEEQKERKTTEMQSPMQPVDQASLPGHCREPPPWENE | |
| | ATERIYHFVVGQMVYYQCVQGYRALHRGPAESVCKMTHGKTRWTQPQLICTG | |
| | E | |
| Chains 3 | DIVMTQTPLSLPVTPGEPASISCRSSQSIVSSWGNTYLEWYLQKPGQSPQLL | 589 |
| and 4 | IYKVSNRFSGVPDRFSGSGSGTDFTLKISRVEAEDVGVYYCFQGSHVPWTFG | |
| hD3_IgkLC | QGTKVEIKRTVAAPSVFIFPPSDEQLKSGTASVVCLLNNFYPREAKVQWKVD | |
| | NALQSGNSQESVTEQDSKDSTYSLSSTLTLSKADYEKHKVYACEVTHQGLSS | |
| | PVTKSFNRGEC | |

P28102716 - Fusion to proIL-2

| | | |
|---|---|---|
| Chains 1 | QVTLKESGPALVKPTQTLTLTCTFSGFSLSTPGMGVWWIRQPPGKALEWLAD | 590 |
| and 2 | IWWDDNKYTNPSLKSRLTISKDTSKNQVVLTMTNMDPVDTATYYCARRANYG | |
| hD3_IgG1(AAA)_ | NPYYAQDYWGQGTTVTVSSASTKGPSVFPLAPSSKSTSGGTAALGCLVKDYF | |
| delK- | PEPVTVSWNSGALTSGVHTFPAVLQSSGLYSLSSVVTVPSSSLGTQTYICNV | |
| GGSPLGLAGG | NHKPSNTKVDKKVEPKSCDKTHTCPPCPAPEAAGGPSVFLFPPKPKDTLMIS | |
| GS-GG- | RTPEVTCVVVDVSHEDPEVKFNWYVDGVEVHNAKTKPREEQYNSTYRVVSVL | |
| L_wt_del_ | TVLHQDWLNGKEYKCKVSNKALAAPIEKTISKAKGQPREPQVYTLPPSRDEL | |
| APASS_K35E_ | TKNQVSLTCLVKGFYPSDIAVEWESNGQPENNYKTTPPVLDSDGSFFLYSKL | |
| F42A_Y45A- | TVDKSRWQQGNVFSCSVMHEALHNHYTQKSLSLSPG [symbol] ST | |
| GGSGG- | KKTQLQLEHLLLDLQMILNGINNYKNPELTRMLTAKFAMPKKATELKHLQCL | |
| PLGLAG- | EEELKPLEEVLNLAQSKNFHLRPRDLISNINVIVLELKGSETTFMCEYADET | |
| SGRSDNR- | ATIVEFLNRWITFSQSIISTLT [symbol] [symbol] ELCDDDPPE | |
| GGA-R | IPHATFKAMAYKEGTMLNCECKRGFRRIKSGSLYMLCTGNSSHSSWDNQCQC | |
| 14/21R | TSSATRNTTKQVTPQPEEQKERKTTEMQSPMQPVDQASLPGHCREPPPWENE | |
| | ATERIYHFVVGQMVYYQCVQGYRALHRGPAESVCKMTHGKTRWTQPQLICTG | |
| | E | |
| Chains 3 | DIVMTQTPLSLPVTPGEPASISCRSSQSIVSSWGNTYLEWYLQKPGQSPQLL | 591 |
| and 4 | TYKVSNRFSGVPDRFSGSGSGTDFTLKISRVEAEDVGVYYCFQGSHVPWTFG | |
| hD3_IgkLC | QGTKVEIKRTVAAPSVFIFPPSDEQLKSGTASVVCLLNNFYPREAKVQWKVD | |
| | NALQSGNSQESVTEQDSKDSTYSLSSTLTLSKADYEKHKVYACEVTHQGLSS | |
| | PVTKSFNRGEC | |

P28472797 - Fusion to proIL-2

| | | |
|---|---|---|
| Chains 1 | QVTLKESGPALVKPTQTLTLTCTFSGFSLSTSGMGVGWIRQPPGKALEWLAD | 592 |
| and 2 | IWWDDNKYANPSLKSRLTISKDTSKNQVVLTMTNMDPVDTATYYCARRANYG | |
| hB7_IgG1(AAA)_ | NPYYAQDYWGQGTTVTVSSASTKGPSVFPLAPSSKSTSGGTAALGCLVKDYF | |
| delK- | PEPVTVSWNSGALTSGVHTFPAVLQSSGLYSLSSVVTVPSSSLGTQTYICNV | |
| GGSGGSPLGL | NHKPSNTKVDKKVEPKSCDKTHTCPPCPAPEAAGGPSVFLFPPKPKDTLMIS | |
| AGGGSGGS- | RTPEVTCVVVDVSHEDPEVKFNWYVDGVEVHNAKTKPREEQYNSTYRVVSVL | |
| GG- | TVLHQDWLNGKEYKCKVSNKALAAPIEKTISKAKGQPREPQVYTLPPSRDEL | |
| L_wt_del_ | TKNQVSLTCLVKGFYPSDIAVEWESNGQPENNYKTTPPVLDSDGSFFLYSKL | |
| APASS_F42A_ | TVDKSRWQQGNVFSCSVMHEALHNHYTQKSLSLSPG [symbol] | |
| K43E_E61K- | [symbol] GGSTKKTQLQLEHLLLDLQMILNGINNYKNPKLTRMLTAEFYMPKKATEL | |
| GGSGG- | KHLQCLEKELKPLEEVLNLAQSKNFHLRPRDLISNINVIVLELKGSETTFMC | |
| PLGLAG- | EYADETATIVEFLNRWITFSQSIISTLT [symbol] [symbol] ELC | |
| SGRSDNR- | DDDPPEIPHATFKAMAYKEGTMLNCKCKRGFRRIESGSLYMLCTGNSSHSSW | |
| GGA- | DNQCQCTSSATRNTTKQVTPQPEEQKERKTTEMQSPMQPVDQASLPGHCREP | |
| R_E29K_K38E | PPWENEATERIYHFVVGQMVYYQCVQGYRALHRGPAESVCKMTHGKTRWTQP | |
| 20/21R | QLICTGE | |
| Chains 3 | DIVMTQTPLSLPVTPGEPASISCRSSQSIVHSSGNTYLEWYLQKPGQSPQLL | 593 |
| and 4 | IYKVSNRFSGVPDRFSGSGSGTDFTLKISRVEAEDVGVYYCFQGSHVPWTFG | |
| hB7S_IgkLC | QGTKVEIKRTVAAPSVFIFPPSDEQLKSGTASVVCLLNNFYPREAKVQWKVD | |
| | NALQSGNSQESVTEQDSKDSTYSLSSTLTLSKADYEKHKVYACEVTHQGLSS | |
| | PVTKSFNRGEC | |

P28472798 - Fusion to proIL-2

| | | |
|---|---|---|
| Chains 1 | QVTLKESGPALVKPTQTLTLTCTFSGFSLSTSGMGVGWIRQPPGKALEWLAD | 594 |
| and 2 | IWWDDNKYANPSLKSRLTISKDTSKNQVVLTMTNMDPVDTATYYCARRANYG | |
| hB7_IgG1(AAA)_ | NPYYAQDYWGQGTTVTVSSASTKGPSVFPLAPSSKSTSGGTAALGCLVKDYF | |
| delK- | PEPVTVSWNSGALTSGVHTFPAVLQSSGLYSLSSVVTVPSSSLGTQTYICNV | |
| GGSGGSPLGL | NHKPSNTKVDKKVEPKSCDKTHTCPPCPAPEAAGGPSVFLFPPKPKDTLMIS | |
| AGGGSGGS- | RTPEVTCVVVDVSHEDPEVKFNWYVDGVEVHNAKTKPREEQYNSTYRVVSVL | |
| GG- | TVLHQDWLNGKEYKCKVSNKALAAPIEKTISKAKGQPREPQVYTLPPSRDEL | |
| L_wt_del_ | TKNQVSLTCLVKGFYPSDIAVEWESNGQPENNYKTTPPVLDSDGSFFLYSKL | |
| APASS_F42A_ | TVDKSRWQQGNVFSCSVMHEALHNHYTQKSLSLSPG [symbol] | |
| K43E_E61K- | [symbol] GGSTKKTQLQLEHLLLDLQMILNGINNYKNPKLTRMLTAEFYMPKKATEL | |
| GGSGG- | KHLQCLEKELKPLEEVLNLAQSKNFHLRPRDLISNINVIVLELKGSETTFMC | |
| PLGLAG- | EYADETATIVEFLNRWITFSQSIISTLT [symbol] [symbol] ELC | |
| SGRSDNR- | DDDPPEIPHATFKAMAYKEGTMLNCKCKRGFRRIESGSLYMLCTGNSSHSSW | |
| GGA- | DNQCQCTSSATRNTTKQVTPQPEEQKERKTTEMQSPMQPVDQASLPGHCREP | |
| R_E29K_K38E | PPWENEATERIYHFVVGQMVYYQCVQGYRALHRGPAESVCKMTHGKTRWTQP | |
| 20/21R | QLICTGE | |
| Chains 3 | DIVMTQTPLSLPVTPGEPASISCRSSQSIVHSNANTYLEWYLQKPGQSPQLL | 595 |
| and 4 | IYKVSNRFSGVPDRFSGSGSGTDFTLKISRVEAEDVGVYYCFQGSHVPWTFG | |
| hB7A_IgkLC | QGTKVEIKRTVAAPSVFIFPPSDEQLKSGTASVVCLLNNFYPREAKVQWKVD | |
| | NALQSGNSQESVTEQDSKDSTYSLSSTLTLSKADYEKHKVYACEVTHQGLSS | |
| | PVTKSFNRGEC | |

P28482714 - Fusion to proIL-2

| | | |
|---|---|---|
| Chains 1 | QVTLKESGPALVKPTQTLTLTCTFSGFSLSTPGMGVWWIRQPPGKALEWLAD | 596 |
| and 2 | IWWDDNKYTNPSLKSRLTISKDTSKNQVVLTMTNMDPVDTATYYCARRANYG | |
| hD3_IgG1(AAA)_ | NPYYAQDYWGQGTTVTVSSASTKGPSVFPLAPSSKSTSGGTAALGCLVKDYF | |
| delK- | PEPVTVSWNSGALTSGVHTFPAVLQSSGLYSLSSVVTVPSSSLGTQTYICNV | |
| GGSGGSPLGL | NHKPSNTKVDKKVEPKSCDKTHTCPPCPAPEAAGGPSVFLFPPKPKDTLMIS | |
| AGGGSGGS- | RTPEVTCVVVDVSHEDPEVKFNWYVDGVEVHNAKTKPREEQYNSTYRVVSVL | |
| GG- | TVLHQDWLNGKEYKCKVSNKALAAPIEKTISKAKGQPREPQVYTLPPSRDEL | |
| L_wt_del_ | TKNQVSLTCLVKGFYPSDIAVEWESNGQPENNYKTTPPVLDSDGSFFLYSKL | |
| APASS_F42A_ | TVDKSRWQQGNVFSCSVMHEALHNHYTQKSLSLSPG [symbol] | |
| K43E_E61K- | [symbol] GGSTKKTQLQLEHLLLDLQMILNGINNYKNPKLTRMLTAEFYMPKKATEL | |
| GGSGG- | KHLQCLEKELKPLEEVLNLAQSKNFHLRPRDLISNINVIVLELKGSETTFMC | |
| PLGLAG- | EYADETATIVEFLNRWITFSQSIISTLT [symbol] [symbol] ELC | |
| SGRSDNR- | DDDPPEIPHATFKAMAYKEGTMLNCKCKRGFRRIESGSLYMLCTGNSSHSSW | |
| GGA- | DNQCQCTSSATRNTTKQVTPQPEEQKERKTTEMQSPMQPVDQASLPGHCREP | |
| R_E29K_K38E | PPWENEATERIYHFVVGQMVYYQCVQGYRALHRGPAESVCKMTHGKTRWTQP | |
| 20/21R | QLICTGE | |
| Chains 3 | DIVMTQTPLSLPVTPGEPASISCRSSQSIVHSQGNTYLEWYLQKPGQSPQLL | 597 |
| and 4 | TYKVSNRFSGVPDRFSGSGSGTDFTLKISRVEAEDVGVYYCFQGSHVPWTFG | |
| hB7Q_IgkLC | QGTKVEIKRTVAAPSVFIFPPSDEQLKSGTASVVCLLNNFYPREAKVQWKVD | |
| | NALQSGNSQESVTEQDSKDSTYSLSSTLTLSKADYEKHKVYACEVTHQGLSS | |
| | PVTKSFNRGEC | |

P28482716 - Fusion to proIL-2

| | | |
|---|---|---|
| Chains 1 | QVTLKESGPALVKPTQTLTLTCTFSGFSLSTPGMGVWWIRQPPGKALEWLAD | 598 |
| and 2 | IWWDDNKYTNPSLKSRLTISKDTSKNQVVLTMTNMDPVDTATYYCARRANYG | |
| hD3_IgG1(AAA)_ | NPYYAQDYWGQGTTVTVSSASTKGPSVFPLAPSSKSTSGGTAALGCLVKDYF | |
| delK- | PEPVTVSWNSGALTSGVHTFPAVLQSSGLYSLSSVVTVPSSSLGTQTYICNV | |
| GGSGGSPLGL | NHKPSNTKVDKKVEPKSCDKTHTCPPCPAPEAAGGPSVFLFPPKPKDTLMIS | |
| AGGGSGGS- | RTPEVTCVVVDVSHEDPEVKFNWYVDGVEVHNAKTKPREEQYNSTYRVVSVL | |
| GG- | TVLHQDWLNGKEYKCKVSNKALAAPIEKTISKAKGQPREPQVYTLPPSRDEL | |
| L_wt_del_ | TKNQVSLTCLVKGFYPSDIAVEWESNGQPENNYKTTPPVLDSDGSFFLYSKL | |
| APASS_F42A_ | TVDKSRWQQGNVFSCSVMHEALHNHYTQKSLSLSPG [symbol] | |
| K43E_E61K- | [symbol] GGSTKKTQLQLEHLLLDLQMILNGINNYKNPKLTRMLTAEFYMPKKATEL | |
| GGSGG- | KHLQCLEKELKPLEEVLNLAQSKNFHLRPRDLISNINVIVLELKGSETTFMC | |
| PLGLAG- | EYADETATIVEFLNRWITFSQSIISTLT [symbol] [symbol] ELC | |
| SGRSDNR- | DDDPPEIPHATFKAMAYKEGTMLNCKCKRGFRRIESGSLYMLCTGNSSHSSW | |
| GGA- | DNQCQCTSSATRNTTKQVTPQPEEQKERKTTEMQSPMQPVDQASLPGHCREP | |
| R_E29K_K38E | PPWENEATERIYHFVVGQMVYYQCVQGYRALHRGPAESVCKMTHGKTRWTQP | |
| 20/21R | QLICTGE | |
| Chains 3 | DIVMTQTPLSLPVTPGEPASISCRSSQSIVSSWGNTYLEWYLQKPGQSPQLL | 599 |
| and 4 | IYKVSNRFSGVPDRFSGSGSGTDFTLKISRVEAEDVGVYYCFQGSHVPWTFG | |
| hD3_IgkLC | QGTKVEIKRTVAAPSVFIFPPSDEQLKSGTASVVCLLNNFYPREAKVQWKVD | |
| | NALQSGNSQESVTEQDSKDSTYSLSSTLTLSKADYEKHKVYACEVTHQGLSS | |
| | PVTKSFNRGEC | |

P28482797 - Fusion to proIL-2

| | | |
|---|---|---|
| Chains 1 | QVTLKESGPALVKPTQTLTLTCTFSGFSLSTPGMGVWWIRQPPGKALEWLAD | 600 |
| and 2 | IWWDDNKYTNPSLKSRLTISKDTSKNQVVLTMTNMDPVDTATYYCARRANYG | |
| hD3_IgG1(AAA)_ | NPYYAQDYWGQGTTVTVSSASTKGPSVFPLAPSSKSTSGGTAALGCLVKDYF | |
| delK- | PEPVTVSWNSGALTSGVHTFPAVLQSSGLYSLSSVVTVPSSSLGTQTYICNV | |
| GGSGGSPLGL | NHKPSNTKVDKKVEPKSCDKTHTCPPCPAPEAAGGPSVFLFPPKPKDTLMIS | |
| AGGGSGGS- | RTPEVTCVVVDVSHEDPEVKFNWYVDGVEVHNAKTKPREEQYNSTYRVVSVL | |
| GG- | TVLHQDWLNGKEYKCKVSNKALAAPIEKTISKAKGQPREPQVYTLPPSRDEL | |
| L_wt_del_ | TKNQVSLTCLVKGFYPSDIAVEWESNGQPENNYKTTPPVLDSDGSFFLYSKL | |
| APASS_F42A_ | TVDKSRWQQGNVFSCSVMHEALHNHYTQKSLSLSPG [symbol] | |
| K43E_E61K- | [symbol] GGSTKKTQLQLEHLLLDLQMILNGINNYKNPKLTRMLTAEFYMPKKATEL | |
| GGSGG- | KHLQCLEKELKPLEEVLNLAQSKNFHLRPRDLISNINVIVLELKGSETTFMC | |
| PLGLAG- | EYADETATIVEFLNRWITFSQSIISTLT [symbol] [symbol] ELC | |
| SGRSDNR- | DDDPPEIPHATFKAMAYKEGTMLNCKCKRGFRRIESGSLYMLCTGNSSHSSW | |
| GGA- | DNQCQCTSSATRNTTKQVTPQPEEQKERKTTEMQSPMQPVDQASLPGHCREP | |
| R_E29K_K38E | PPWENEATERIYHFVVGQMVYYQCVQGYRALHRGPAESVCKMTHGKTRWTQP | |
| 20/21R | QLICTGE | |
| Chains 3 | DIVMTQTPLSLPVTPGEPASISCRSSQSIVHSSGNTYLEWYLQKPGQSPQLL | 601 |
| and 4 | IYKVSNRFSGVPDRFSGSGSGTDFTLKISRVEAEDVGVYYCFQGSHVPWTFG | |
| hB7S_IgkLC | QGTKVEIKRTVAAPSVFIFPPSDEQLKSGTASVVCLLNNFYPREAKVQWKVD | |
| | NALQSGNSQESVTEQDSKDSTYSLSSTLTLSKADYEKHKVYACEVTHQGLSS | |
| | PVTKSFNRGEC | |

P28482798 - Fusion to proIL-2

| | | |
|---|---|---|
| Chains 1 | QVTLKESGPALVKPTQTLTLTCTFSGFSLSTPGMGVWWIRQPPGKALEWLAD | 602 |
| and 2 | IWWDDNKYTNPSLKSRLTISKDTSKNQVVLTMTNMDPVDTATYYCARRANYG | |
| hD3_IgG1(AAA)_ | NPYYAQDYWGQGTTVTVSSASTKGPSVFPLAPSSKSTSGGTAALGCLVKDYF | |
| delK- | PEPVTVSWNSGALTSGVHTFPAVLQSSGLYSLSSVVTVPSSSLGTQTYICNV | |
| GGSGGSPLGL | NHKPSNTKVDKKVEPKSCDKTHTCPPCPAPEAAGGPSVFLFPPKPKDTLMIS | |
| AGGGSGGS- | RTPEVTCVVVDVSHEDPEVKFNWYVDGVEVHNAKTKPREEQYNSTYRVVSVL | |
| GG- | TVLHQDWLNGKEYKCKVSNKALAAPIEKTISKAKGQPREPQVYTLPPSRDEL | |
| L_wt_del_ | TKNQVSLTCLVKGFYPSDIAVEWESNGQPENNYKTTPPVLDSDGSFFLYSKL | |
| APASS_F42A_ | TVDKSRWQQGNVFSCSVMHEALHNHYTQKSLSLSPG [symbol] | |
| K43E_E61K- | [symbol] GGSTKKTQLQLEHLLLDLQMILNGINNYKNPKLTRMLTAEFYMPKKATEL | |
| GGSGG- | KHLQCLEKELKPLEEVLNLAQSKNFHLRPRDLISNINVIVLELKGSETTFMC | |
| PLGLAG- | EYADETATIVEFLNRWITFSQSIISTLT [symbol] [symbol] ELC | |
| SGRSDNR- | DDDPPEIPHATFKAMAYKEGTMLNCKCKRGFRRIESGSLYMLCTGNSSHSSW | |
| GGA- | DNQCQCTSSATRNTTKQVTPQPEEQKERKTTEMQSPMQPVDQASLPGHCREP | |
| R_E29K_K38E | PPWENEATERIYHFVVGQMVYYQCVQGYRALHRGPAESVCKMTHGKTRWTQP | |
| 20/21R | QLICTGE | |
| Chains 3 | DIVMTQTPLSLPVTPGEPASISCRSSQSIVHSNANTYLEWYLQKPGQSPQLL | 603 |
| and 4 | IYKVSNRFSGVPDRFSGSGSGTDFTLKISRVEAEDVGVYYCFQGSHVPWTFG | |
| hB7A_IgkLC | QGTKVEIKRTVAAPSVFIFPPSDEQLKSGTASVVCLLNNFYPREAKVQWKVD | |
| | NALQSGNSQESVTEQDSKDSTYSLSSTLTLSKADYEKHKVYACEVTHQGLSS | |
| | PVTKSFNRGEC | |

P27172713 - Fusion to proIL-15

| | | |
|---|---|---|
| Chains 1 | QVTLKESGPALVKPTQTLTLTCTFSGFSLSTSGMGVGWIRQPPGKALEWLAD | 604 |
| and 2 | IWWDDNKYANPSLKSRLTISKDTSKNQVVLTMTNMDPVDTATYYCARRANYG | |
| hB7_IgG1(AAA)_ | NPYYAQDYWGQGTTVTVSSASTKGPSVFPLAPSSKSTSGGTAALGCLVKDYF | |
| delK- | PEPVTVSWNSGALTSGVHTFPAVLQSSGLYSLSSVVTVPSSSLGTQTYICNV | |
| PLGLAG- | NHKPSNTKVDKKVEPKSCDKTHTCPPCPAPEAAGGPSVFLFPPKPKDTLMIS | |
| SGRSDNR- | RTPEVTCVVVDVSHEDPEVKFNWYVDGVEVHNAKTKPREEQYNSTYRVVSVL | |
| GS- | TVLHQDWLNGKEYKCKVSNKALAAPIEKTISKAKGQPREPQVYTLPPSRDEL | |
| L_V49D_ | TKNQVSLTCLVKGFYPSDIAVEWESNGQPENNYKTTPPVLDSDGSFFLYSKL | |
| (S162A)- | TVDKSRWQQGNVFSCSVMHEALHNHYTQKSLSLSPG [symbol] N | |
| GGGSGGGSGG | WVNVISDLKKIEDLIQSMHIDATLYTESDVHPSCKVTAMKCFLLELQDISLE | |
| GSGGGSGGGS | SGDASIHDTVENLIILANNSLSSNGNVTESGCKECEELEEKNIKEFLQSFVH | |
| GGGS-R_T2A | IVQMFINTA [symbol] [symbol] IACPPPMSVEHADIWVKSY | |
| 15R/24 | SLYSRERYICNSGFKRKAGTSSLTECVLNKATNVAHWTTPSLKCIRDPALVH | |
| | QRPAPPS | |
| Chains 3 | DIVMTQTPLSLPVTPGEPASISCRSSQSIVHSNGNTYLEWYLQKPGQSPQLL | 605 |
| and 4 | IYKVSNRFSGVPDRFSGSGSGTDFTLKISRVEAEDVGVYYCFQGSHVPWTFG | |
| hB7_IgkLC | QGTKVEIKRTVAAPSVFIFPPSDEQLKSGTASVVCLLNNFYPREAKVQWKVD | |
| | NALQSGNSQESVTEQDSKDSTYSLSSTLTLSKADYEKHKVYACEVTHQGLSS | |
| | PVTKSFNRGEC | |

P27182713 - Fusion to proIL-15

| | | |
|---|---|---|
| Chains 1 | QVTLKESGPALVKPTQTLTLTCTFSGFSLSTSGMGVGWIRQPPGKALEWLAD | 606 |
| and 2 | IWWDDNKYANPSLKSRLTISKDTSKNQVVLTMTNMDPVDTATYYCARRANYG | |
| hB7_IgG1(AAA)_ | NPYYAQDYWGQGTTVTVSSASTKGPSVFPLAPSSKSTSGGTAALGCLVKDYF | |
| delK- | PEPVTVSWNSGALTSGVHTFPAVLQSSGLYSLSSVVTVPSSSLGTQTYICNV | |
| PLGLAG- | NHKPSNTKVDKKVEPKSCDKTHTCPPCPAPEAAGGPSVFLFPPKPKDTLMIS | |
| SGRSDNR- | RTPEVTCVVVDVSHEDPEVKFNWYVDGVEVHNAKTKPREEQYNSTYRVVSVL | |
| GGGS- | TVLHQDWLNGKEYKCKVSNKALAAPIEKTISKAKGQPREPQVYTLPPSRDEL | |
| L_V49D_ | TKNQVSLTCLVKGFYPSDIAVEWESNGQPENNYKTTPPVLDSDGSFFLYSKL | |
| (S162A)- | TVDKSRWQQGNVFSCSVMHEALHNHYTQKSLSLSPG [symbol] | |
| GGGSGGGSGG | [symbol] NWVNVISDLKKIEDLIQSMHIDATLYTESDVHPSCKVTAMKCFLLELQDIS | |
| GSGGGSGGGS | LESGDASIHDTVENLIILANNSLSSNGNVTESGCKECEELEEKNIKEFLQSF | |
| GGGS-R_T2A | VHIVQMFINTA [symbol] [symbol] IACPPPMSVEHADIWVK | |
| 17R/24 | SYSLYSRERYICNSGFKRKAGTSSLTECVLNKATNVAHWTTPSLKCIRDPAL | |
| | VHQRPAPPS | |
| Chains 3 | DIVMTQTPLSLPVTPGEPASISCRSSQSIVHSNGNTYLEWYLQKPGQSPQLL | 607 |
| and 4 | IYKVSNRFSGVPDRFSGSGSGTDFTLKISRVEAEDVGVYYCFQGSHVPWTFG | |
| hB7_IgkLC | QGTKVEIKRTVAAPSVFIFPPSDEQLKSGTASVVCLLNNFYPREAKVQWKVD | |
| | NALQSGNSQESVTEQDSKDSTYSLSSTLTLSKADYEKHKVYACEVTHQGLSS | |
| | PVTKSFNRGEC | |

P27192713 - Fusion to proIL-15

| | | |
|---|---|---|
| Chains 1 | QVTLKESGPALVKPTQTLTLTCTFSGFSLSTSGMGVGWIRQPPGKALEWLAD | 608 |
| and 2 | IWWDDNKYANPSLKSRLTISKDTSKNQVVLTMTNMDPVDTATYYCARRANYG | |
| hB7_IgG1(AAA)_ | NPYYAQDYWGQGTTVTVSSASTKGPSVFPLAPSSKSTSGGTAALGCLVKDYF | |
| delK- | PEPVTVSWNSGALTSGVHTFPAVLQSSGLYSLSSVVTVPSSSLGTQTYICNV | |
| PLGLAG- | NHKPSNTKVDKKVEPKSCDKTHTCPPCPAPEAAGGPSVFLFPPKPKDTLMIS | |
| SGRSDNR- | RTPEVTCVVVDVSHEDPEVKFNWYVDGVEVHNAKTKPREEQYNSTYRVVSVL | |
| GGGS- | TVLHQDWLNGKEYKCKVSNKALAAPIEKTISKAKGQPREPQVYTLPPSRDEL | |
| L_V49D_K86F_ | TKNQVSLTCLVKGFYPSDIAVEWESNGQPENNYKTTPPVLDSDGSFFLYSKL | |
| (S162A)- | TVDKSRWQQGNVFSCSVMHEALHNHYTQKSLSLSPG [symbol] | |
| GGGSGGGSGG | [symbol] NWVNVISDLKKIEDLIQSMHIDATLYTESDVHPSCKVTAMKCFLLELQDIS | |
| GSGGGSGGGS | LESGDASIHDTVENLIILANNSLSSNGNVTESGCFECEELEEKNIKEFLQSF | |
| GGGS-R_T2A | VHIVQMFINTA [symbol] [symbol] IACPPPMSVEHADIWVK | |
| 17R/24 | SYSLYSRERYICNSGFKRKAGTSSLTECVLNKATNVAHWTTPSLKCIRDPAL | |
| | VHQRPAPPS | |
| Chains 3 | DIVMTQTPLSLPVTPGEPASISCRSSQSIVHSNGNTYLEWYLQKPGQSPQLL | 609 |
| and 4 | IYKVSNRFSGVPDRFSGSGSGTDFTLKISRVEAEDVGVYYCFQGSHVPWTFG | |
| hB7_IgkLC | QGTKVEIKRTVAAPSVFIFPPSDEQLKSGTASVVCLLNNFYPREAKVQWKVD | |
| | NALQSGNSQESVTEQDSKDSTYSLSSTLTLSKADYEKHKVYACEVTHQGLSS | |
| | PVTKSFNRGEC | |

P27202713 - Fusion to proIL-15

| | | |
|---|---|---|
| Chains 1 | QVTLKESGPALVKPTQTLTLTCTFSGFSLSTSGMGVGWIRQPPGKALEWLAD | 610 |
| and 2 | IWWDDNKYANPSLKSRLTISKDTSKNQVVLTMTNMDPVDTATYYCARRANYG | |
| hB7_IgG1(AAA)_ | NPYYAQDYWGQGTTVTVSSASTKGPSVFPLAPSSKSTSGGTAALGCLVKDYF | |
| delK- | PEPVTVSWNSGALTSGVHTFPAVLQSSGLYSLSSVVTVPSSSLGTQTYICNV | |
| PLGLAG- | NHKPSNTKVDKKVEPKSCDKTHTCPPCPAPEAAGGPSVFLFPPKPKDTLMIS | |
| SGRSDNR- | RTPEVTCVVVDVSHEDPEVKFNWYVDGVEVHNAKTKPREEQYNSTYRVVSVL | |
| GGGS- | TVLHQDWLNGKEYKCKVSNKALAAPIEKTISKAKGQPREPQVYTLPPSRDEL | |
| L_V49D_K86G_ | TKNQVSLTCLVKGFYPSDIAVEWESNGQPENNYKTTPPVLDSDGSFFLYSKL | |
| (S162A)- | TVDKSRWQQGNVFSCSVMHEALHNHYTQKSLSLSPG [symbol] | |
| GGGSGGGSGG | [symbol] NWVNVISDLKKIEDLIQSMHIDATLYTESDVHPSCKVTAMKCFLLELQDIS | |
| GSGGGSGGGS | LESGDASIHDTVENLIILANNSLSSNGNVTESGCGECEELEEKNIKEFLQSF | |
| GGGS-R_T2A | VHIVQMFINTA [symbol] [symbol] IACPPPMSVEHADIWVK | |
| 17R/24 | SYSLYSRERYICNSGFKRKAGTSSLTECVLNKATNVAHWTTPSLKCIRDPAL | |
| | VHQRPAPPS | |
| Chains 3 | DIVMTQTPLSLPVTPGEPASISCRSSQSIVHSNGNTYLEWYLQKPGQSPQLL | 611 |
| and 4 | IYKVSNRFSGVPDRFSGSGSGTDFTLKISRVEAEDVGVYYCFQGSHVPWTFG | |
| hB7_IgkLC | QGTKVEIKRTVAAPSVFIFPPSDEQLKSGTASVVCLLNNFYPREAKVQWKVD | |
| | NALQSGNSQESVTEQDSKDSTYSLSSTLTLSKADYEKHKVYACEVTHQGLSS | |
| | PVTKSFNRGEC | |

P27202714 - Fusion to proIL-15

| | | |
|---|---|---|
| Chains 1 | QVTLKESGPALVKPTQTLTLTCTFSGFSLSTSGMGVGWIRQPPGKALEWLAD | 612 |
| and 2 | IWWDDNKYANPSLKSRLTISKDTSKNQVVLTMTNMDPVDTATYYCARRANYG | |
| hB7_IgG1(AAA)_ | NPYYAQDYWGQGTTVTVSSASTKGPSVFPLAPSSKSTSGGTAALGCLVKDYF | |
| delK- | PEPVTVSWNSGALTSGVHTFPAVLQSSGLYSLSSVVTVPSSSLGTQTYICNV | |
| PLGLAG- | NHKPSNTKVDKKVEPKSCDKTHTCPPCPAPEAAGGPSVFLFPPKPKDTLMIS | |
| SGRSDNR- | RTPEVTCVVVDVSHEDPEVKFNWYVDGVEVHNAKTKPREEQYNSTYRVVSVL | |
| GGGS- | TVLHQDWLNGKEYKCKVSNKALAAPIEKTISKAKGQPREPQVYTLPPSRDEL | |
| L_V49D_K86G_ | TKNQVSLTCLVKGFYPSDIAVEWESNGQPENNYKTTPPVLDSDGSFFLYSKL | |
| (S162A)- | TVDKSRWQQGNVFSCSVMHEALHNHYTQKSLSLSPG [symbol] | |
| GGGSGGGSGG | [symbol] NWVNVISDLKKIEDLIQSMHIDATLYTESDVHPSCKVTAMKCFLLELQDIS | |
| GSGGGSGGGS | LESGDASIHDTVENLIILANNSLSSNGNVTESGCGECEELEEKNIKEFLQSF | |
| GGGS-R_T2A | VHIVQMFINTA [symbol] [symbol] IACPPPMSVEHADIWVK | |
| 17R/24 | SYSLYSRERYICNSGFKRKAGTSSLTECVLNKATNVAHWTTPSLKCIRDPAL | |
| | VHQRPAPPS | |
| Chains 3 | DIVMTQTPLSLPVTPGEPASISCRSSQSIVHSQGNTYLEWYLQKPGQSPQLL | 613 |
| and 4 | IYKVSNRFSGVPDRFSGSGSGTDFTLKISRVEAEDVGVYYCFQGSHVPWTFG | |
| hB7Q_IgkLC | QGTKVEIKRTVAAPSVFIFPPSDEQLKSGTASVVCLLNNFYPREAKVQWKVD | |
| | NALQSGNSQESVTEQDSKDSTYSLSSTLTLSKADYEKHKVYACEVTHQGLSS | |
| | PVTKSFNRGEC | |

P27202716 - Fusion to proIL-15

| | | |
|---|---|---|
| Chains 1 | QVTLKESGPALVKPTQTLTLTCTFSGFSLSTSGMGVGWIRQPPGKALEWLAD | 614 |
| and 2 | IWWDDNKYANPSLKSRLTISKDTSKNQVVLTMTNMDPVDTATYYCARRANYG | |
| hB7_IgG1(AAA)_ | NPYYAQDYWGQGTTVTVSSASTKGPSVFPLAPSSKSTSGGTAALGCLVKDYF | |
| delK- | PEPVTVSWNSGALTSGVHTFPAVLQSSGLYSLSSVVTVPSSSLGTQTYICNV | |
| PLGLAG- | NHKPSNTKVDKKVEPKSCDKTHTCPPCPAPEAAGGPSVFLFPPKPKDTLMIS | |
| SGRSDNR- | RTPEVTCVVVDVSHEDPEVKFNWYVDGVEVHNAKTKPREEQYNSTYRVVSVL | |
| GGGS- | TVLHQDWLNGKEYKCKVSNKALAAPIEKTISKAKGQPREPQVYTLPPSRDEL | |
| L_V49D_K86G_ | TKNQVSLTCLVKGFYPSDIAVEWESNGQPENNYKTTPPVLDSDGSFFLYSKL | |
| (S162A)- | TVDKSRWQQGNVFSCSVMHEALHNHYTQKSLSLSPG [symbol] | |
| GGGSGGGSGG | [symbol] NWVNVISDLKKIEDLIQSMHIDATLYTESDVHPSCKVTAMKCFLLELQDIS | |
| GSGGGSGGGS | LESGDASIHDTVENLIILANNSLSSNGNVTESGCGECEELEEKNIKEFLQSF | |
| GGGS-R_T2A | VHIVQMFINTA [symbol] [symbol] IACPPPMSVEHADIWVK | |
| 17R/24 | SYSLYSRERYICNSGFKRKAGTSSLTECVLNKATNVAHWTTPSLKCIRDPAL | |
| | VHQRPAPPS | |
| Chains 3 | DIVMTQTPLSLPVTPGEPASISCRSSQSIVSSWGNTYLEWYLQKPGQSPQLL | 615 |
| and 4 | IYKVSNRFSGVPDRFSGSGSGTDFTLKISRVEAEDVGVYYCFQGSHVPWTFG | |
| hD3_IgkLC | QGTKVEIKRTVAAPSVFIFPPSDEQLKSGTASVVCLLNNFYPREAKVQWKVD | |
| | NALQSGNSQESVTEQDSKDSTYSLSSTLTLSKADYEKHKVYACEVTHQGLSS | |
| | PVTKSFNRGEC | |

P27202797 - Fusion to proIL-15

| | | |
|---|---|---|
| Chains 1 | QVTLKESGPALVKPTQTLTLTCTFSGFSLSTSGMGVGWIRQPPGKALEWLAD | 616 |
| and 2 | IWWDDNKYANPSLKSRLTISKDTSKNQVVLTMTNMDPVDTATYYCARRANYG | |
| hB7_IgG1(AAA)_ | NPYYAQDYWGQGTTVTVSSASTKGPSVFPLAPSSKSTSGGTAALGCLVKDYF | |
| delK- | PEPVTVSWNSGALTSGVHTFPAVLQSSGLYSLSSVVTVPSSSLGTQTYICNV | |
| PLGLAG- | NHKPSNTKVDKKVEPKSCDKTHTCPPCPAPEAAGGPSVFLFPPKPKDTLMIS | |
| SGRSDNR- | RTPEVTCVVVDVSHEDPEVKFNWYVDGVEVHNAKTKPREEQYNSTYRVVSVL | |
| GGGS- | TVLHQDWLNGKEYKCKVSNKALAAPIEKTISKAKGQPREPQVYTLPPSRDEL | |
| L_V49D_K86G_ | TKNQVSLTCLVKGFYPSDIAVEWESNGQPENNYKTTPPVLDSDGSFFLYSKL | |
| (S162A)- | TVDKSRWQQGNVFSCSVMHEALHNHYTQKSLSLSPG [symbol] | |
| GGGSGGGSGG | [symbol] NWVNVISDLKKIEDLIQSMHIDATLYTESDVHPSCKVTAMKCFLLELQDIS | |
| GSGGGSGGGS | LESGDASIHDTVENLIILANNSLSSNGNVTESGCGECEELEEKNIKEFLQSF | |
| GGGS-R_T2A | VHIVQMFINTA [symbol] [symbol] IACPPPMSVEHADIWVK | |
| 17R/24 | SYSLYSRERYICNSGFKRKAGTSSLTECVLNKATNVAHWTTPSLKCIRDPAL | |
| | VHQRPAPPS | |
| Chains 3 | DIVMTQTPLSLPVTPGEPASISCRSSQSIVHSSGNTYLEWYLQKPGQSPQLL | 617 |
| and 4 | IYKVSNRFSGVPDRFSGSGSGTDFTLKISRVEAEDVGVYYCFQGSHVPWTFG | |
| hB7S_IgkLC | QGTKVEIKRTVAAPSVFIFPPSDEQLKSGTASVVCLLNNFYPREAKVQWKVD | |
| | NALQSGNSQESVTEQDSKDSTYSLSSTLTLSKADYEKHKVYACEVTHQGLSS | |
| | PVTKSFNRGEC | |

P27202798 - Fusion to proIL-15

| | | |
|---|---|---|
| Chains 1 | QVTLKESGPALVKPTQTLTLTCTFSGFSLSTSGMGVGWIRQPPGKALEWLAD | 618 |
| and 2 | IWWDDNKYANPSLKSRLTISKDTSKNQVVLTMTNMDPVDTATYYCARRANYG | |
| hB7_IgG1(AAA)_ | NPYYAQDYWGQGTTVTVSSASTKGPSVFPLAPSSKSTSGGTAALGCLVKDYF | |
| delK- | PEPVTVSWNSGALTSGVHTFPAVLQSSGLYSLSSVVTVPSSSLGTQTYICNV | |
| PLGLAG- | NHKPSNTKVDKKVEPKSCDKTHTCPPCPAPEAAGGPSVFLFPPKPKDTLMIS | |
| SGRSDNR- | RTPEVTCVVVDVSHEDPEVKFNWYVDGVEVHNAKTKPREEQYNSTYRVVSVL | |
| GGGS- | TVLHQDWLNGKEYKCKVSNKALAAPIEKTISKAKGQPREPQVYTLPPSRDEL | |
| L_V49D_K86G_ | TKNQVSLTCLVKGFYPSDIAVEWESNGQPENNYKTTPPVLDSDGSFFLYSKL | |
| (S162A)- | TVDKSRWQQGNVFSCSVMHEALHNHYTQKSLSLSPG [symbol] | |
| GGGSGGGSGG | [symbol] NWVNVISDLKKIEDLIQSMHIDATLYTESDVHPSCKVTAMKCFLLELQDIS | |
| GSGGGSGGGS | LESGDASIHDTVENLIILANNSLSSNGNVTESGCGECEELEEKNIKEFLQSF | |
| GGGS-R_T2A | VHIVQMFINTA [symbol] [symbol] IACPPPMSVEHADIWVK | |
| 17R/24 | SYSLYSRERYICNSGFKRKAGTSSLTECVLNKATNVAHWTTPSLKCIRDPAL | |
| | VHQRPAPPS | |
| Chains 3 | DIVMTQTPLSLPVTPGEPASISCRSSQSIVHSNANTYLEWYLQKPGQSPQLL | 619 |
| and 4 | IYKVSNRFSGVPDRFSGSGSGTDFTLKISRVEAEDVGVYYCFQGSHVPWTFG | |
| hB7A_IgkLC | QGTKVEIKRTVAAPSVFIFPPSDEQLKSGTASVVCLLNNFYPREAKVQWKVD | |
| | NALQSGNSQESVTEQDSKDSTYSLSSTLTLSKADYEKHKVYACEVTHQGLSS | |
| | PVTKSFNRGEC | |

P27212713 - Fusion to proIL-15

| | | |
|---|---|---|
| Chains 1 | QVTLKESGPALVKPTQTLTLTCTFSGFSLSTSGMGVGWIRQPPGKALEWLAD | 620 |
| and 2 | IWWDDNKYANPSLKSRLTISKDTSKNQVVLTMTNMDPVDTATYYCARRANYG | |
| hB7_IgG1(AAA)_ | NPYYAQDYWGQGTTVTVSSASTKGPSVFPLAPSSKSTSGGTAALGCLVKDYF | |
| delK- | PEPVTVSWNSGALTSGVHTFPAVLQSSGLYSLSSVVTVPSSSLGTQTYICNV | |
| GS-PLGLAG- | NHKPSNTKVDKKVEPKSCDKTHTCPPCPAPEAAGGPSVFLFPPKPKDTLMIS | |
| SGRSDNR- | RTPEVTCVVVDVSHEDPEVKFNWYVDGVEVHNAKTKPREEQYNSTYRVVSVL | |
| GGGS- | TVLHQDWLNGKEYKCKVSNKALAAPIEKTISKAKGQPREPQVYTLPPSRDEL | |
| L_V49D_ | TKNQVSLTCLVKGFYPSDIAVEWESNGQPENNYKTTPPVLDSDGSFFLYSKL | |
| (S162A)- | TVDKSRWQQGNVFSCSVMHEALHNHYTQKSLSLSPG [symbol] | |
| GGGSGGGSGG | [symbol] NWVNVISDLKKIEDLIQSMHIDATLYTESDVHPSCKVTAMKCFLLELQD | |
| GSGGGSGGGS | ISLESGDASIHDTVENLIILANNSLSSNGNVTESGCKECEELEEKNIKEFLQ | |
| GGGS-R_T2A | SFVHIVQMFINTA [symbol] [symbol] IACPPPMSVEHADIW | |
| 19R/24 | VKSYSLYSRERYICNSGFKRKAGTSSLTECVLNKATNVAHWTTPSLKCIRDP | |
| | ALVHQRPAPPS | |
| Chains 3 | DIVMTQTPLSLPVTPGEPASISCRSSQSIVHSNGNTYLEWYLQKPGQSPQLL | 621 |
| and 4 | TYKVSNRFSGVPDRFSGSGSGTDFTLKISRVEAEDVGVYYCFQGSHVPWTFG | |
| hB7_IgkLC | QGTKVEIKRTVAAPSVFIFPPSDEQLKSGTASVVCLLNNFYPREAKVQWKVD | |
| | NALQSGNSQESVTEQDSKDSTYSLSSTLTLSKADYEKHKVYACEVTHQGLSS | |
| | PVTKSFNRGEC | |

P27212714 - Fusion to proIL-15

| | | |
|---|---|---|
| Chains 1 | QVTLKESGPALVKPTQTLTLTCTFSGFSLSTSGMGVGWIRQPPGKALEWLAD | 622 |
| and 2 | IWWDDNKYANPSLKSRLTISKDTSKNQVVLTMTNMDPVDTATYYCARRANYG | |
| hB7_IgG1(AAA)_ | NPYYAQDYWGQGTTVTVSSASTKGPSVFPLAPSSKSTSGGTAALGCLVKDYF | |
| delK- | PEPVTVSWNSGALTSGVHTFPAVLQSSGLYSLSSVVTVPSSSLGTQTYICNV | |
| GS-PLGLAG- | NHKPSNTKVDKKVEPKSCDKTHTCPPCPAPEAAGGPSVFLFPPKPKDTLMIS | |
| SGRSDNR- | RTPEVTCVVVDVSHEDPEVKFNWYVDGVEVHNAKTKPREEQYNSTYRVVSVL | |
| GGGS- | TVLHQDWLNGKEYKCKVSNKALAAPIEKTISKAKGQPREPQVYTLPPSRDEL | |
| L_V49D_ | TKNQVSLTCLVKGFYPSDIAVEWESNGQPENNYKTTPPVLDSDGSFFLYSKL | |
| (S162A)- | TVDKSRWQQGNVFSCSVMHEALHNHYTQKSLSLSPG [symbol] | |
| GGGSGGGSGG | [symbol] NWVNVISDLKKIEDLIQSMHIDATLYTESDVHPSCKVTAMKCFLLELQD | |
| GSGGGSGGGS | ISLESGDASIHDTVENLIILANNSLSSNGNVTESGCKECEELEEKNIKEFLQ | |
| GGGS-R_T2A | SFVHIVQMFINTA [symbol] [symbol] IACPPPMSVEHADIW | |
| 19R/24 | VKSYSLYSRERYICNSGFKRKAGTSSLTECVLNKATNVAHWTTPSLKCIRDP | |
| | ALVHQRPAPPS | |
| Chains 3 | DIVMTQTPLSLPVTPGEPASISCRSSQSIVHSQGNTYLEWYLQKPGQSPQLL | 623 |
| and 4 | TYKVSNRFSGVPDRFSGSGSGTDFTLKISRVEAEDVGVYYCFQGSHVPWTFG | |
| hB7Q_IgkLC | QGTKVEIKRTVAAPSVFIFPPSDEQLKSGTASVVCLLNNFYPREAKVQWKVD | |
| | NALQSGNSQESVTEQDSKDSTYSLSSTLTLSKADYEKHKVYACEVTHQGLSS | |
| | PVTKSFNRGEC | |

P27212716 - Fusion to proIL-15

| | | |
|---|---|---|
| Chains 1 | QVTLKESGPALVKPTQTLTLTCTFSGFSLSTSGMGVGWIRQPPGKALEWLAD | 624 |
| and 2 | IWWDDNKYANPSLKSRLTISKDTSKNQVVLTMTNMDPVDTATYYCARRANYG | |
| hB7_IgG1(AAA)_ | NPYYAQDYWGQGTTVTVSSASTKGPSVFPLAPSSKSTSGGTAALGCLVKDYF | |
| delK- | PEPVTVSWNSGALTSGVHTFPAVLQSSGLYSLSSVVTVPSSSLGTQTYICNV | |
| GS-PLGLAG- | NHKPSNTKVDKKVEPKSCDKTHTCPPCPAPEAAGGPSVFLFPPKPKDTLMIS | |
| SGRSDNR- | RTPEVTCVVVDVSHEDPEVKFNWYVDGVEVHNAKTKPREEQYNSTYRVVSVL | |
| GGGS- | TVLHQDWLNGKEYKCKVSNKALAAPIEKTISKAKGQPREPQVYTLPPSRDEL | |
| L_V49D_ | TKNQVSLTCLVKGFYPSDIAVEWESNGQPENNYKTTPPVLDSDGSFFLYSKL | |
| (S162A)- | TVDKSRWQQGNVFSCSVMHEALHNHYTQKSLSLSPG [symbol] | |
| GGGSGGGSGG | [symbol] NWVNVISDLKKIEDLIQSMHIDATLYTESDVHPSCKVTAMKCFLLELQD | |
| GSGGGSGGGS | ISLESGDASIHDTVENLIILANNSLSSNGNVTESGCKECEELEEKNIKEFLQ | |
| GGGS-R_T2A | SFVHIVQMFINTA [symbol] [symbol] IACPPPMSVEHADIW | |
| 19R/24 | VKSYSLYSRERYICNSGFKRKAGTSSLTECVLNKATNVAHWTTPSLKCIRDP | |
| | ALVHQRPAPPS | |
| Chains 3 | DIVMTQTPLSLPVTPGEPASISCRSSQSIVSSWGNTYLEWYLQKPGQSPQLL | 625 |
| and 4 | TYKVSNRFSGVPDRFSGSGSGTDFTLKISRVEAEDVGVYYCFQGSHVPWTFG | |
| hD3_IgkLC | QGTKVEIKRTVAAPSVFIFPPSDEQLKSGTASVVCLLNNFYPREAKVQWKVD | |
| | NALQSGNSQESVTEQDSKDSTYSLSSTLTLSKADYEKHKVYACEVTHQGLSS | |
| | PVTKSFNRGEC | |

P27902713 - Fusion to proIL-15

| | | |
|---|---|---|
| Chains 1 | QVTLKESGPALVKPTQTLTLTCTFSGFSLSTSGMGVGWIRQPPGKALEWLAD | 626 |
| and 2 | IWWDDNKYANPSLKSRLTISKDTSKNQVVLTMTNMDPVDTATYYCARRANYG | |
| hB7_IgG1 | NPYYAQDYWGQGTTVTVSSASTKGPSVFPLAPSSKSTSGGTAALGCLVKDYF | |
| (AAA)_delK- | PEPVTVSWNSGALTSGVHTFPAVLQSSGLYSLSSVVTVPSSSLGTQTYICNV | |
| GGGGSG- | NHKPSNTKVDKKVEPKSCDKTHTCPPCPAPEAAGGPSVFLFPPKPKDTLMIS | |
| GGSGGGS- | RTPEVTCVVVDVSHEDPEVKFNWYVDGVEVHNAKTKPREEQYNSTYRVVSVL | |
| GGGS- | TVLHQDWLNGKEYKCKVSNKALAAPIEKTISKAKGQPREPQVYTLPPSRDEL | |
| L_V49D_K86G_ | TKNQVSLTCLVKGFYPSDIAVEWESNGQPENNYKTTPPVLDSDGSFFLYSKL | |
| (S162A)- | TVDKSRWQQGNVFSCSVMHEALHNHYTQKSLSLSPG [symbol] | |
| GGGSGGGSGG | [symbol] NWVNVISDLKKIEDLIQSMHIDATLYTESDVHPSCKVTAMKCFLLELQDIS | |
| GSGGGSGGGS | LESGDASIHDTVENLIILANNSLSSNGNVTESGCGECEELEEKNIKEFLQSF | |
| GGGS-R_T2A | VHIVQMFINTA [symbol] [symbol] IACPPPMSVEHADIWVK | |
| 17/24 | SYSLYSRERYICNSGFKRKAGTSSLTECVLNKATNVAHWTTPSLKCIRDPAL | |
| (stable) | VHQRPAPPS | |
| Chains 3 | DIVMTQTPLSLPVTPGEPASISCRSSQSIVHSNGNTYLEWYLQKPGQSPQLL | 627 |
| and 4 | IYKVSNRFSGVPDRFSGSGSGTDFTLKISRVEAEDVGVYYCFQGSHVPWTFG | |
| hB7_IgkLC | QGTKVEIKRTVAAPSVFIFPPSDEQLKSGTASVVCLLNNFYPREAKVQWKVD | |
| | NALQSGNSQESVTEQDSKDSTYSLSSTLTLSKADYEKHKVYACEVTHQGLSS | |
| | PVTKSFNRGEC | |

P27912716 - Fusion to proIL-15

| | | |
|---|---|---|
| Chains 1 | QVTLKESGPALVKPTQTLTLTCTFSGFSLSTPGMGVWWIRQPPGKALEWLAD | 628 |
| and 2 | IWWDDNKYTNPSLKSRLTISKDTSKNQVVLTMTNMDPVDTATYYCARRANYG | |
| hD3_IgG1(AAA)_ | NPYYAQDYWGQGTTVTVSSASTKGPSVFPLAPSSKSTSGGTAALGCLVKDYF | |
| delK- | PEPVTVSWNSGALTSGVHTFPAVLQSSGLYSLSSVVTVPSSSLGTQTYICNV | |
| PLGLAG- | NHKPSNTKVDKKVEPKSCDKTHTCPPCPAPEAAGGPSVFLFPPKPKDTLMIS | |
| SGRSDNR- | RTPEVTCVVVDVSHEDPEVKFNWYVDGVEVHNAKTKPREEQYNSTYRVVSVL | |
| GGGS- | TVLHQDWLNGKEYKCKVSNKALAAPIEKTISKAKGQPREPQVYTLPPSRDEL | |
| L_V49D_K86G_ | TKNQVSLTCLVKGFYPSDIAVEWESNGQPENNYKTTPPVLDSDGSFFLYSKL | |
| (S162A)- | TVDKSRWQQGNVFSCSVMHEALHNHYTQKSLSLSPG [symbol] | |
| GGGSGGGSGG | [symbol] NWVNVISDLKKIEDLIQSMHIDATLYTESDVHPSCKVTAMKCFLLELQDIS | |
| GSGGGSGGGS | LESGDASIHDTVENLIILANNSLSSNGNVTESGCGECEELEEKNIKEFLQSF | |
| GGGS-R_T2A | VHIVQMFINTA [symbol] [symbol] IACPPPMSVEHADIWVK | |
| 17R/24 | SYSLYSRERYICNSGFKRKAGTSSLTECVLNKATNVAHWTTPSLKCIRDPAL | |
| | VHQRPAPPS | |
| Chains 3 | DIVMTQTPLSLPVTPGEPASISCRSSQSIVSSWGNTYLEWYLQKPGQSPQLL | 629 |
| and 4 | TYKVSNRFSGVPDRFSGSGSGTDFTLKISRVEAEDVGVYYCFQGSHVPWTFG | |
| hD3_IgkLC | QGTKVEIKRTVAAPSVFIFPPSDEQLKSGTASVVCLLNNFYPREAKVQWKVD | |
| | NALQSGNSQESVTEQDSKDSTYSLSSTLTLSKADYEKHKVYACEVTHQGLSS | |
| | PVTKSFNRGEC | |

P27922716 - Fusion to proIL-15

| | | |
|---|---|---|
| Chains 1 | QVTLKESGPALVKPTQTLTLTCTFSGFSLSTPGMGVWWIRQPPGKALEWLAD | 630 |
| and 2 | IWWDDNKYTNPSLKSRLTISKDTSKNQVVLTMTNMDPVDTATYYCARRANYG | |
| hD3_IgG1(AAA)_ | NPYYAQDYWGQGTTVTVSSASTKGPSVFPLAPSSKSTSGGTAALGCLVKDYF | |
| delK- | PEPVTVSWNSGALTSGVHTFPAVLQSSGLYSLSSVVTVPSSSLGTQTYICNV | |
| GGGGSG- | NHKPSNTKVDKKVEPKSCDKTHTCPPCPAPEAAGGPSVFLFPPKPKDTLMIS | |
| GGSGGGS- | RTPEVTCVVVDVSHEDPEVKFNWYVDGVEVHNAKTKPREEQYNSTYRVVSVL | |
| GGGS- | TVLHQDWLNGKEYKCKVSNKALAAPIEKTISKAKGQPREPQVYTLPPSRDEL | |
| L_V49D_K86G_ | TKNQVSLTCLVKGFYPSDIAVEWESNGQPENNYKTTPPVLDSDGSFFLYSKL | |
| (S162A)- | TVDKSRWQQGNVFSCSVMHEALHNHYTQKSLSLSPG [symbol] | |
| GGGSGGGSGG | [symbol] NWVNVISDLKKIEDLIQSMHIDATLYTESDVHPSCKVTAMKCFLLELQDIS | |
| GSGGGSGGGS | LESGDASIHDTVENLIILANNSLSSNGNVTESGCGECEELEEKNIKEFLQSF | |
| GGGS-R_T2A | VHIVQMFINTA [symbol] [symbol] IACPPPMSVEHADIWVK | |
| 17/24 | SYSLYSRERYICNSGFKRKAGTSSLTECVLNKATNVAHWTTPSLKCIRDPAL | |
| (stable) | VHQRPAPPS | |
| Chains 3 | DIVMTQTPLSLPVTPGEPASISCRSSQSIVSSWGNTYLEWYLQKPGQSPQLL | 631 |
| and 4 | IYKVSNRFSGVPDRFSGSGSGTDFTLKISRVEAEDVGVYYCFQGSHVPWTFG | |
| hD3_IgkLC | QGTKVEIKRTVAAPSVFIFPPSDEQLKSGTASVVCLLNNFYPREAKVQWKVD | |
| | NALQSGNSQESVTEQDSKDSTYSLSSTLTLSKADYEKHKVYACEVTHQGLSS | |
| | PVTKSFNRGEC | |

P27932713 - Fusion to proIL-15

| | | |
|---|---|---|
| Chains 1 | QVTLKESGPALVKPTQTLTLTCTFSGFSLSTSGMGVGWIRQPPGKALEWLAD | 632 |
| and 2 | IWWDDNKYANPSLKSRLTISKDTSKNQVVLTMTNMDPVDTATYYCARRANYG | |
| hB7_IgG1(AAA)_ | NPYYAQDYWGQGTTVTVSSASTKGPSVFPLAPSSKSTSGGTAALGCLVKDYF | |
| delK- | PEPVTVSWNSGALTSGVHTFPAVLQSSGLYSLSSVVTVPSSSLGTQTYICNV | |
| PLGLAG- | NHKPSNTKVDKKVEPKSCDKTHTCPPCPAPEAAGGPSVFLFPPKPKDTLMIS | |
| SGRSDNR- | RTPEVTCVVVDVSHEDPEVKFNWYVDGVEVHNAKTKPREEQYNSTYRVVSVL | |
| GGGS- | TVLHQDWLNGKEYKCKVSNKALAAPIEKTISKAKGQPREPQVYTLPPSRDEL | |
| L_V49D_K86G_ | TKNQVSLTCLVKGFYPSDIAVEWESNGQPENNYKTTPPVLDSDGSFFLYSKL | |
| (S162A) | TVDKSRWQQGNVFSCSVMHEALHNHYTQKSLSLSPG [symbol] | |
| 17R | [symbol] NWVNVISDLKKIEDLIQSMHIDATLYTESDVHPSCKVTAMKCFLLELQDIS | |
| | LESGDASIHDTVENLIILANNSLSSNGNVTESGCGECEELEEKNIKEFLQSF | |
| | VHIVQMFINTA | |
| Chains 3 | DIVMTQTPLSLPVTPGEPASISCRSSQSIVHSNGNTYLEWYLQKPGQSPQLL | 633 |
| and 4 | IYKVSNRFSGVPDRFSGSGSGTDFTLKISRVEAEDVGVYYCFQGSHVPWTFG | |
| hB7_IgkLC | QGTKVEIKRTVAAPSVFIFPPSDEQLKSGTASVVCLLNNFYPREAKVQWKVD | |
| | NALQSGNSQESVTEQDSKDSTYSLSSTLTLSKADYEKHKVYACEVTHQGLSS | |
| | PVTKSFNRGEC | |

P27952714 - Fusion to proIL-15

| | | |
|---|---|---|
| Chains 1 | QVTLKESGPALVKPTQTLTLTCTFSGFSLSTSGMGVGWIRQPPGKALEWLAD | 634 |
| and 2 | IWWDDNKYANPSLKSRLTISKDTSKNQVVLTMTNMDPVDTATYYCARRANYG | |
| hB7_IgG1(AAA)_ | NPYYAQDYWGQGTTVTVSSASTKGPSVFPLAPSSKSTSGGTAALGCLVKDYF | |
| delK- | PEPVTVSWNSGALTSGVHTFPAVLQSSGLYSLSSVVTVPSSSLGTQTYICNV | |
| PLGLAG- | NHKPSNTKVDKKVEPKSCDKTHTCPPCPAPEAAGGPSVFLFPPKPKDTLMIS | |
| SGRSDNR- | RTPEVTCVVVDVSHEDPEVKFNWYVDGVEVHNAKTKPREEQYNSTYRVVSVL | |
| GGGS- | TVLHQDWLNGKEYKCKVSNKALAAPIEKTISKAKGQPREPQVYTLPPSRDEL | |
| L_V49D_N77A_ | TKNQVSLTCLVKGFYPSDIAVEWESNGQPENNYKTTPPVLDSDGSFFLYSKL | |
| K86G_ | TVDKSRWQQGNVFSCSVMHEALHNHYTQKSLSLSPG [symbol] | |
| (S162A)- | [symbol] NWVNVISDLKKIEDLIQSMHIDATLYTESDVHPSCKVTAMKCFLLELQDIS | |
| GGGSGGGSGG | LESGDASIHDTVENLIILANNSLSSAGNVTESGCGECEELEEKNIKEFLQSF | |
| GSGGGSGGGS | VHIVQMFINTA [symbol] [symbol] IACPPPMSVEHADIWVK | |
| GGGS-R_T2A | SYSLYSRERYICNSGFKRKAGTSSLTECVLNKATNVAHWTTPSLKCIRDPAL | |
| 17R/24 | VHQRPAPPS | |
| Chains 3 | DIVMTQTPLSLPVTPGEPASISCRSSQSIVHSQGNTYLEWYLQKPGQSPQLL | 635 |
| and 4 | IYKVSNRFSGVPDRFSGSGSGTDFTLKISRVEAEDVGVYYCFQGSHVPWTFG | |
| hB7Q_IgkLC | QGTKVEIKRTVAAPSVFIFPPSDEQLKSGTASVVCLLNNFYPREAKVQWKVD | |
| | NALQSGNSQESVTEQDSKDSTYSLSSTLTLSKADYEKHKVYACEVTHQGLSS | |
| | PVTKSFNRGEC | |

P27952716 - Fusion to proIL-15

| | | |
|---|---|---|
| Chains 1 | QVTLKESGPALVKPTQTLTLTCTFSGFSLSTSGMGVGWIRQPPGKALEWLAD | 636 |
| and 2 | IWWDDNKYANPSLKSRLTISKDTSKNQVVLTMTNMDPVDTATYYCARRANYG | |
| hB7_IgG1(AAA)_ | NPYYAQDYWGQGTTVTVSSASTKGPSVFPLAPSSKSTSGGTAALGCLVKDYF | |
| delK- | PEPVTVSWNSGALTSGVHTFPAVLQSSGLYSLSSVVTVPSSSLGTQTYICNV | |
| PLGLAG- | NHKPSNTKVDKKVEPKSCDKTHTCPPCPAPEAAGGPSVFLFPPKPKDTLMIS | |
| SGRSDNR- | RTPEVTCVVVDVSHEDPEVKFNWYVDGVEVHNAKTKPREEQYNSTYRVVSVL | |
| GGGS- | TVLHQDWLNGKEYKCKVSNKALAAPIEKTISKAKGQPREPQVYTLPPSRDEL | |
| L_V49D_N77A_ | TKNQVSLTCLVKGFYPSDIAVEWESNGQPENNYKTTPPVLDSDGSFFLYSKL | |
| K86G_ | TVDKSRWQQGNVFSCSVMHEALHNHYTQKSLSLSPG [symbol] | |
| (S162A)- | [symbol] NWVNVISDLKKIEDLIQSMHIDATLYTESDVHPSCKVTAMKCFLLELQDIS | |
| GGGSGGGSGG | LESGDASIHDTVENLIILANNSLSSAGNVTESGCGECEELEEKNIKEFLQSF | |
| GSGGGSGGGS | VHIVQMFINTA [symbol] [symbol] IACPPPMSVEHADIWVK | |
| GGGS-R_T2A | SYSLYSRERYICNSGFKRKAGTSSLTECVLNKATNVAHWTTPSLKCIRDPAL | |
| 17R/24 | VHQRPAPPS | |
| Chains 3 | DIVMTQTPLSLPVTPGEPASISCRSSQSIVSSWGNTYLEWYLQKPGQSPQLL | 637 |
| and 4 | TYKVSNRFSGVPDRFSGSGSGTDFTLKISRVEAEDVGVYYCFQGSHVPWTFG | |
| hD3_IgkLC | QGTKVEIKRTVAAPSVFIFPPSDEQLKSGTASVVCLLNNFYPREAKVQWKVD | |
| | NALQSGNSQESVTEQDSKDSTYSLSSTLTLSKADYEKHKVYACEVTHQGLSS | |
| | PVTKSFNRGEC | |

P27952797 - Fusion to proIL-15

| | | |
|---|---|---|
| Chains 1 | QVTLKESGPALVKPTQTLTLTCTFSGFSLSTSGMGVGWIRQPPGKALEWLAD | 638 |
| and 2 | IWWDDNKYANPSLKSRLTISKDTSKNQVVLTMTNMDPVDTATYYCARRANYG | |
| hB7_IgG1(AAA)_ | NPYYAQDYWGQGTTVTVSSASTKGPSVFPLAPSSKSTSGGTAALGCLVKDYF | |
| delK- | PEPVTVSWNSGALTSGVHTFPAVLQSSGLYSLSSVVTVPSSSLGTQTYICNV | |
| PLGLAG- | NHKPSNTKVDKKVEPKSCDKTHTCPPCPAPEAAGGPSVFLFPPKPKDTLMIS | |
| SGRSDNR- | RTPEVTCVVVDVSHEDPEVKFNWYVDGVEVHNAKTKPREEQYNSTYRVVSVL | |
| GGGS- | TVLHQDWLNGKEYKCKVSNKALAAPIEKTISKAKGQPREPQVYTLPPSRDEL | |
| L_V49D_N77A_ | TKNQVSLTCLVKGFYPSDIAVEWESNGQPENNYKTTPPVLDSDGSFFLYSKL | |
| K86G_ | TVDKSRWQQGNVFSCSVMHEALHNHYTQKSLSLSPG [symbol] | |
| (S162A)- | [symbol] NWVNVISDLKKIEDLIQSMHIDATLYTESDVHPSCKVTAMKCFLLELQDIS | |
| GGGSGGGSGG | LESGDASIHDTVENLIILANNSLSSAGNVTESGCGECEELEEKNIKEFLQSF | |
| GSGGGSGGGS | VHIVQMFINTA [symbol] [symbol] IACPPPMSVEHADIWVK | |
| GGGS-R_T2A | SYSLYSRERYICNSGFKRKAGTSSLTECVLNKATNVAHWTTPSLKCIRDPAL | |
| 17R/24 | VHQRPAPPS | |
| Chains 3 | DIVMTQTPLSLPVTPGEPASISCRSSQSIVHSSGNTYLEWYLQKPGQSPQLL | 639 |
| and 4 | IYKVSNRFSGVPDRFSGSGSGTDFTLKISRVEAEDVGVYYCFQGSHVPWTFG | |
| hB7S_IgkLC | QGTKVEIKRTVAAPSVFIFPPSDEQLKSGTASVVCLLNNFYPREAKVQWKVD | |
| | NALQSGNSQESVTEQDSKDSTYSLSSTLTLSKADYEKHKVYACEVTHQGLSS | |
| | PVTKSFNRGEC | |

P27952798 - Fusion to proIL-15

| | | |
|---|---|---|
| Chains 1 | QVTLKESGPALVKPTQTLTLTCTFSGFSLSTSGMGVGWIRQPPGKALEWLAD | 640 |
| and 2 | IWWDDNKYANPSLKSRLTISKDTSKNQVVLTMTNMDPVDTATYYCARRANYG | |
| hB7_IgG1(AAA)_ | NPYYAQDYWGQGTTVTVSSASTKGPSVFPLAPSSKSTSGGTAALGCLVKDYF | |
| delK- | PEPVTVSWNSGALTSGVHTFPAVLQSSGLYSLSSVVTVPSSSLGTQTYICNV | |
| PLGLAG- | NHKPSNTKVDKKVEPKSCDKTHTCPPCPAPEAAGGPSVFLFPPKPKDTLMIS | |
| SGRSDNR- | RTPEVTCVVVDVSHEDPEVKFNWYVDGVEVHNAKTKPREEQYNSTYRVVSVL | |
| GGGS- | TVLHQDWLNGKEYKCKVSNKALAAPIEKTISKAKGQPREPQVYTLPPSRDEL | |
| L_V49D_N77A_ | TKNQVSLTCLVKGFYPSDIAVEWESNGQPENNYKTTPPVLDSDGSFFLYSKL | |
| K86G_ | TVDKSRWQQGNVFSCSVMHEALHNHYTQKSLSLSPG [symbol] | |
| (S162A)- | [symbol] NWVNVISDLKKIEDLIQSMHIDATLYTESDVHPSCKVTAMKCFLLELQDIS | |
| GGGSGGGSGG | LESGDASIHDTVENLIILANNSLSSAGNVTESGCGECEELEEKNIKEFLQSF | |
| GSGGGSGGGS | VHIVQMFINTA [symbol] [symbol] IACPPPMSVEHADIWVK | |
| GGGS-R_T2A | SYSLYSRERYICNSGFKRKAGTSSLTECVLNKATNVAHWTTPSLKCIRDPAL | |
| 17R/24 | VHQRPAPPS | |
| Chains 3 | DIVMTQTPLSLPVTPGEPASISCRSSQSIVHSNANTYLEWYLQKPGQSPQLL | 641 |
| and 4 | TYKVSNRFSGVPDRFSGSGSGTDFTLKISRVEAEDVGVYYCFQGSHVPWTFG | |
| hB7A_IgkLC | QGTKVEIKRTVAAPSVFIFPPSDEQLKSGTASVVCLLNNFYPREAKVQWKVD | |
| | NALQSGNSQESVTEQDSKDSTYSLSSTLTLSKADYEKHKVYACEVTHQGLSS | |
| | PVTKSFNRGEC | |

P27962716 - Fusion to proIL-15

| | | |
|---|---|---|
| Chains 1 | QVTLKESGPALVKPTQTLTLTCTFSGFSLSTPGMGVWWIRQPPGKALEWLAD | 642 |
| and 2 | IWWDDNKYTNPSLKSRLTISKDTSKNQVVLTMTNMDPVDTATYYCARRANYG | |
| hD3_IgG1(AAA)_ | NPYYAQDYWGQGTTVTVSSASTKGPSVFPLAPSSKSTSGGTAALGCLVKDYF | |
| delK- | PEPVTVSWNSGALTSGVHTFPAVLQSSGLYSLSSVVTVPSSSLGTQTYICNV | |
| PLGLAG- | NHKPSNTKVDKKVEPKSCDKTHTCPPCPAPEAAGGPSVFLFPPKPKDTLMIS | |
| SGRSDNR- | RTPEVTCVVVDVSHEDPEVKFNWYVDGVEVHNAKTKPREEQYNSTYRVVSVL | |
| GGGS- | TVLHQDWLNGKEYKCKVSNKALAAPIEKTISKAKGQPREPQVYTLPPSRDEL | |
| L_V49D_N77A_ | TKNQVSLTCLVKGFYPSDIAVEWESNGQPENNYKTTPPVLDSDGSFFLYSKL | |
| K86G_ | TVDKSRWQQGNVFSCSVMHEALHNHYTQKSLSLSPG [symbol] | |
| (S162A)- | [symbol] NWVNVISDLKKIEDLIQSMHIDATLYTESDVHPSCKVTAMKCFLLELQDIS | |
| GGGSGGGSGG | LESGDASIHDTVENLIILANNSLSSAGNVTESGCGECEELEEKNIKEFLQSF | |
| GSGGGSGGGS | VHIVQMFINTA [symbol] [symbol] IACPPPMSVEHADIWVK | |
| GGGS-R_T2A | SYSLYSRERYICNSGFKRKAGTSSLTECVLNKATNVAHWTTPSLKCIRDPAL | |
| 17R/24 | VHQRPAPPS | |
| Chains 3 | DIVMTQTPLSLPVTPGEPASISCRSSQSIVSSWGNTYLEWYLQKPGQSPQLL | 643 |
| and 4 | IYKVSNRFSGVPDRFSGSGSGTDFTLKISRVEAEDVGVYYCFQGSHVPWTFG | |
| hD3_IgkLC | QGTKVEIKRTVAAPSVFIFPPSDEQLKSGTASVVCLLNNFYPREAKVQWKVD | |
| | NALQSGNSQESVTEQDSKDSTYSLSSTLTLSKADYEKHKVYACEVTHQGLSS | |
| | PVTKSFNRGEC | |

P27962797 - Fusion to proIL-15

| | | |
|---|---|---|
| Chains 1 | QVTLKESGPALVKPTQTLTLTCTFSGFSLSTPGMGVWWIRQPPGKALEWLAD | 644 |
| and 2 | IWWDDNKYTNPSLKSRLTISKDTSKNQVVLTMTNMDPVDTATYYCARRANYG | |
| hD3_IgG1(AAA)_ | NPYYAQDYWGQGTTVTVSSASTKGPSVFPLAPSSKSTSGGTAALGCLVKDYF | |
| delK- | PEPVTVSWNSGALTSGVHTFPAVLQSSGLYSLSSVVTVPSSSLGTQTYICNV | |
| PLGLAG- | NHKPSNTKVDKKVEPKSCDKTHTCPPCPAPEAAGGPSVFLFPPKPKDTLMIS | |
| SGRSDNR- | RTPEVTCVVVDVSHEDPEVKFNWYVDGVEVHNAKTKPREEQYNSTYRVVSVL | |
| GGGS- | TVLHQDWLNGKEYKCKVSNKALAAPIEKTISKAKGQPREPQVYTLPPSRDEL | |
| L_V49D_N77A_ | TKNQVSLTCLVKGFYPSDIAVEWESNGQPENNYKTTPPVLDSDGSFFLYSKL | |
| K86G_ | TVDKSRWQQGNVFSCSVMHEALHNHYTQKSLSLSPG [symbol] | |
| (S162A)- | [symbol] NWVNVISDLKKIEDLIQSMHIDATLYTESDVHPSCKVTAMKCFLLELQDIS | |
| GGGSGGGSGG | LESGDASIHDTVENLIILANNSLSSAGNVTESGCGECEELEEKNIKEFLQSF | |
| GSGGGSGGGS | VHIVQMFINTA [symbol] [symbol] IACPPPMSVEHADIWVK | |
| GGGS-R_T2A | SYSLYSRERYICNSGFKRKAGTSSLTECVLNKATNVAHWTTPSLKCIRDPAL | |
| 17R/24 | VHQRPAPPS | |
| Chains 3 | DIVMTQTPLSLPVTPGEPASISCRSSQSIVHSSGNTYLEWYLQKPGQSPQLL | 645 |
| and 4 | IYKVSNRFSGVPDRFSGSGSGTDFTLKISRVEAEDVGVYYCFQGSHVPWTFG | |
| hB7S_IgkLC | QGTKVEIKRTVAAPSVFIFPPSDEQLKSGTASVVCLLNNFYPREAKVQWKVD | |
| | NALQSGNSQESVTEQDSKDSTYSLSSTLTLSKADYEKHKVYACEVTHQGLSS | |
| | PVTKSFNRGEC | |

P27962798 - Fusion to proIL-15

| | | |
|---|---|---|
| Chains 1 | QVTLKESGPALVKPTQTLTLTCTFSGFSLSTPGMGVWWIRQPPGKALEWLAD | 646 |
| and 2 | IWWDDNKYTNPSLKSRLTISKDTSKNQVVLTMTNMDPVDTATYYCARRANYG | |
| hD3_IgG1(AAA)_ | NPYYAQDYWGQGTTVTVSSASTKGPSVFPLAPSSKSTSGGTAALGCLVKDYF | |
| delK- | PEPVTVSWNSGALTSGVHTFPAVLQSSGLYSLSSVVTVPSSSLGTQTYICNV | |
| PLGLAG- | NHKPSNTKVDKKVEPKSCDKTHTCPPCPAPEAAGGPSVFLFPPKPKDTLMIS | |
| SGRSDNR- | RTPEVTCVVVDVSHEDPEVKFNWYVDGVEVHNAKTKPREEQYNSTYRVVSVL | |
| GGGS- | TVLHQDWLNGKEYKCKVSNKALAAPIEKTISKAKGQPREPQVYTLPPSRDEL | |
| L_V49D_N77A_ | TKNQVSLTCLVKGFYPSDIAVEWESNGQPENNYKTTPPVLDSDGSFFLYSKL | |
| K86G_ | TVDKSRWQQGNVFSCSVMHEALHNHYTQKSLSLSPG [symbol] | |
| (S162A)_- | [symbol] NWVNVISDLKKIEDLIQSMHIDATLYTESDVHPSCKVTAMKCFLLELQDIS | |
| GGGSGGGSGG | LESGDASIHDTVENLIILANNSLSSAGNVTESGCGECEELEEKNIKEFLQSF | |
| GSGGGSGGGS | VHIVQMFINTA [symbol] [symbol] IACPPPMSVEHADIWVK | |
| GGGS-R_T2A | SYSLYSRERYICNSGFKRKAGTSSLTECVLNKATNVAHWTTPSLKCIRDPAL | |
| 17R/24 | VHQRPAPPS | |
| Chains 3 | DIVMTQTPLSLPVTPGEPASISCRSSQSIVHSNANTYLEWYLQKPGQSPQLL | 647 |
| and 4 | TYKVSNRFSGVPDRFSGSGSGTDFTLKISRVEAEDVGVYYCFQGSHVPWTFG | |
| hB7A_IgkLC | QGTKVEIKRTVAAPSVFIFPPSDEQLKSGTASVVCLLNNFYPREAKVQWKVD | |
| | NALQSGNSQESVTEQDSKDSTYSLSSTLTLSKADYEKHKVYACEVTHQGLSS | |
| | PVTKSFNRGEC | |

P28492714 - Fusion to proIL-15

| | | |
|---|---|---|
| Chains 1 | QVTLKESGPALVKPTQTLTLTCTFSGFSLSTSGMGVGWIRQPPGKALEWLAD | 648 |
| and 2 | IWWDDNKYANPSLKSRLTISKDTSKNQVVLTMTNMDPVDTATYYCARRANYG | |
| hB7_IgG1(AAA)_ | NPYYAQDYWGQGTTVTVSSASTKGPSVFPLAPSSKSTSGGTAALGCLVKDYF | |
| delK- | PEPVTVSWNSGALTSGVHTFPAVLQSSGLYSLSSVVTVPSSSLGTQTYICNV | |
| GS-PLGLAG- | NHKPSNTKVDKKVEPKSCDKTHTCPPCPAPEAAGGPSVFLFPPKPKDTLMIS | |
| SGRSDNR- | RTPEVTCVVVDVSHEDPEVKFNWYVDGVEVHNAKTKPREEQYNSTYRVVSVL | |
| GGGS- | TVLHQDWLNGKEYKCKVSNKALAAPIEKTISKAKGQPREPQVYTLPPSRDEL | |
| L_V49D_N77A_ | TKNQVSLTCLVKGFYPSDIAVEWESNGQPENNYKTTPPVLDSDGSFFLYSKL | |
| K86G_ | TVDKSRWQQGNVFSCSVMHEALHNHYTQKSLSLSPG [symbol] | |
| (S162A)- | [symbol] NWVNVISDLKKIEDLIQSMHIDATLYTESDVHPSCKVTAMKCFLLELQD | |
| GGGSGGGSGG | ISLESGDASIHDTVENLIILANNSLSSAGNVTESGCGECEELEEKNIKEFLQ | |
| GSGGGSGGGS | SFVHIVQMFINTA [symbol] [symbol] IACPPPMSVEHADIW | |
| GGGS-R_T2A | VKSYSLYSRERYICNSGFKRKAGTSSLTECVLNKATNVAHWTTPSLKCIRDP | |
| 19R/24 | ALVHQRPAPPS | |
| Chains 3 | DIVMTQTPLSLPVTPGEPASISCRSSQSIVHSQGNTYLEWYLQKPGQSPQLL | 649 |
| and 4 | IYKVSNRFSGVPDRFSGSGSGTDFTLKISRVEAEDVGVYYCFQGSHVPWTFG | |
| hB7Q_IgkLC | QGTKVEIKRTVAAPSVFIFPPSDEQLKSGTASVVCLLNNFYPREAKVQWKVD | |
| | NALQSGNSQESVTEQDSKDSTYSLSSTLTLSKADYEKHKVYACEVTHQGLSS | |
| | PVTKSFNRGEC | |

P28502716 - Fusion to proIL-15

| | | |
|---|---|---|
| Chains 1 | QVTLKESGPALVKPTQTLTLTCTFSGFSLSTPGMGVWWIRQPPGKALEWLAD | 650 |
| and 2 | IWWDDNKYTNPSLKSRLTISKDTSKNQVVLTMTNMDPVDTATYYCARRANYG | |
| hD3_IgG1(AAA)_ | NPYYAQDYWGQGTTVTVSSASTKGPSVFPLAPSSKSTSGGTAALGCLVKDYF | |
| delK- | PEPVTVSWNSGALTSGVHTFPAVLQSSGLYSLSSVVTVPSSSLGTQTYICNV | |
| GS-PLGLAG- | NHKPSNTKVDKKVEPKSCDKTHTCPPCPAPEAAGGPSVFLFPPKPKDTLMIS | |
| SGRSDNR- | RTPEVTCVVVDVSHEDPEVKFNWYVDGVEVHNAKTKPREEQYNSTYRVVSVL | |
| GGGS- | TVLHQDWLNGKEYKCKVSNKALAAPIEKTISKAKGQPREPQVYTLPPSRDEL | |
| L_V49D_N77A_ | TKNQVSLTCLVKGFYPSDIAVEWESNGQPENNYKTTPPVLDSDGSFFLYSKL | |
| K86G_ | TVDKSRWQQGNVFSCSVMHEALHNHYTQKSLSLSPG [symbol] | |
| (S162A)- | [symbol] NWVNVISDLKKIEDLIQSMHIDATLYTESDVHPSCKVTAMKCFLLELQD | |
| GGGSGGGSGG | ISLESGDASIHDTVENLIILANNSLSSAGNVTESGCGECEELEEKNIKEFLQ | |
| GSGGGSGGGS | SFVHIVQMFINTA [symbol] [symbol] IACPPPMSVEHADIW | |
| GGGS-R_T2A | VKSYSLYSRERYICNSGFKRKAGTSSLTECVLNKATNVAHWTTPSLKCIRDP | |
| 19R/24 | ALVHQRPAPPS | |
| Chains 3 | DIVMTQTPLSLPVTPGEPASISCRSSQSIVSSWGNTYLEWYLQKPGQSPQLL | 651 |
| and 4 | IYKVSNRFSGVPDRFSGSGSGTDFTLKISRVEAEDVGVYYCFQGSHVPWTFG | |
| hD3_IgkLC | QGTKVEIKRTVAAPSVFIFPPSDEQLKSGTASVVCLLNNFYPREAKVQWKVD | |
| | NALQSGNSQESVTEQDSKDSTYSLSSTLTLSKADYEKHKVYACEVTHQGLSS | |
| | PVTKSFNRGEC | |

P28612716 - Fusion to proIL-15

| | | |
|---|---|---|
| Chains 1 | QVTLKESGPALVKPTQTLTLTCTFSGFSLSTPGMGVWWIRQPSGKALEWLAD | 652 |
| and 2 | IWWDDNKYTNPSLKSRLTISKDTSKNQVVLTMTNMDPVDTATYYCARRANYG | |
| hD3a_IgG1(AAA) | NPYYAQDYWGQGTTVTVSSASTKGPSVFPLAPSSKSTSGGTAALGCLVKDYF | |
| delK- | PEPVTVSWNSGALTSGVHTFPAVLQSSGLYSLSSVVTVPSSSLGTQTYICNV | |
| PLGLAG- | NHKPSNTKVDKKVEPKSCDKTHTCPPCPAPEAAGGPSVFLFPPKPKDTLMIS | |
| SGRSDNR- | RTPEVTCVVVDVSHEDPEVKFNWYVDGVEVHNAKTKPREEQYNSTYRVVSVL | |
| GGGS- | TVLHQDWLNGKEYKCKVSNKALAAPIEKTISKAKGQPREPQVYTLPPSRDEL | |
| L_V49D_N77A_ | TKNQVSLTCLVKGFYPSDIAVEWESNGQPENNYKTTPPVLDSDGSFFLYSKL | |
| K86G_ | TVDKSRWQQGNVFSCSVMHEALHNHYTQKSLSLSPG [symbol] | |
| (S162A)- | [symbol] NWVNVISDLKKIEDLIQSMHIDATLYTESDVHPSCKVTAMKCFLLELQDIS | |
| GGGSGGGSGG | LESGDASIHDTVENLIILANNSLSSAGNVTESGCGECEELEEKNIKEFLQSF | |
| GSGGGSGGGS | VHIVQMFINTA [symbol] [symbol] IACPPPMSVEHADIWVK | |
| GGGS-R_T2A | SYSLYSRERYICNSGFKRKAGTSSLTECVLNKATNVAHWTTPSLKCIRDPAL | |
| 17R/24 | VHQRPAPPS | |
| Chains 3 | DIVMTQTPLSLPVTPGEPASISCRSSQSIVSSWGNTYLEWYLQKPGQSPQLL | 653 |
| and 4 | IYKVSNRFSGVPDRFSGSGSGTDFTLKISRVEAEDVGVYYCFQGSHVPWTFG | |
| hD3_IgkLC | QGTKVEIKRTVAAPSVFIFPPSDEQLKSGTASVVCLLNNFYPREAKVQWKVD | |
| | NALQSGNSQESVTEQDSKDSTYSLSSTLTLSKADYEKHKVYACEVTHQGLSS | |
| | PVTKSFNRGEC | |

P28672716 - Fusion to proIL-15

| | | |
|---|---|---|
| Chains 1 | QVTLKESGPALVKPTQTLTLTCTFSGFSLSTPGMGVWWIRQPPGKALEWLAD | 654 |
| and 2 | IWWDDNKYTNPSLKSRLTISKDTSKNQVVLTMTNMDPVDTATYYCARRANYG | |
| 15LR- | NPYYAQDYWGQGTTVTVSSASTKGPSVFPLAPSSKSTSGGTAALGCLVKDYF | |
| 273_hD3_ | PEPVTVSWNSGALTSGVHTFPAVLQSSGLYSLSSVVTVPSSSLGTQTYICNV | |
| IgG1(AAA)_ | NHKPSNTKVDKKVEPKSCDKTHTCPPCPAPEAAGGPSVFLFPPKPKDTLMIS | |
| delK-GGS- | RTPEVTCVVVDVSHEDPEVKFNWYVDGVEVHNAKTKPREEQYNSTYRVVSVL | |
| PLGLAG-GGS- | TVLHQDWLNGKEYKCKVSNKALAAPIEKTISKAKGQPREPQVYTLPPSRDEL | |
| L_V49D_N77A_ | TKNQVSLTCLVKGFYPSDIAVEWESNGQPENNYKTTPPVLDSDGSFFLYSKL | |
| (S162A)- | TVDKSRWQQGNVFSCSVMHEALHNHYTQKSLSLSPG [symbol] NWVN | |
| GGGS- | VISDLKKIEDLIQSMHIDATLYTESDVHPSCKVTAMKCFLLELQDISLESGD | |
| PLGLAG- | ASIHDTVENLIILANNSLSSAGNVTESGCKECEELEEKNIKEFLQSFVHIVQ | |
| SGRSDNR- | MFINTA [symbol] [symbol] IACPPPMSVEHADIWVKSYSLYSRE | |
| SGGG-R_T2A | RYICNSGFKRKAGTSSLTECVLNKATNVAHWTTPSLKCIRDPALVHQRPAPP | |
| 12/21R | S | |
| Chains 3 | DIVMTQTPLSLPVTPGEPASISCRSSQSIVSSWGNTYLEWYLQKPGQSPQLL | 655 |
| and 4 | IYKVSNRFSGVPDRFSGSGSGTDFTLKISRVEAEDVGVYYCFQGSHVPWTFG | |
| hD3_IgkLC | QGTKVEIKRTVAAPSVFIFPPSDEQLKSGTASVVCLLNNFYPREAKVQWKVD | |
| | NALQSGNSQESVTEQDSKDSTYSLSSTLTLSKADYEKHKVYACEVTHQGLSS | |
| | PVTKSFNRGEC | |

P28672798 - Fusion to proIL-15

| | | |
|---|---|---|
| Chains 1 | QVTLKESGPALVKPTQTLTLTCTFSGFSLSTPGMGVWWIRQPPGKALEWLAD | 656 |
| and 2 | IWWDDNKYTNPSLKSRLTISKDTSKNQVVLTMTNMDPVDTATYYCARRANYG | |
| 15LR- | NPYYAQDYWGQGTTVTVSSASTKGPSVFPLAPSSKSTSGGTAALGCLVKDYF | |
| 273_hD3_ | PEPVTVSWNSGALTSGVHTFPAVLQSSGLYSLSSVVTVPSSSLGTQTYICNV | |
| IgG1(AAA)_ | NHKPSNTKVDKKVEPKSCDKTHTCPPCPAPEAAGGPSVFLFPPKPKDTLMIS | |
| delK-GGS- | RTPEVTCVVVDVSHEDPEVKFNWYVDGVEVHNAKTKPREEQYNSTYRVVSVL | |
| PLGLAG-GGS- | TVLHQDWLNGKEYKCKVSNKALAAPIEKTISKAKGQPREPQVYTLPPSRDEL | |
| L_V49D_N77A_ | TKNQVSLTCLVKGFYPSDIAVEWESNGQPENNYKTTPPVLDSDGSFFLYSKL | |
| (S162A)- | TVDKSRWQQGNVFSCSVMHEALHNHYTQKSLSLSPG [symbol] NWVN | |
| GGGS- | VISDLKKIEDLIQSMHIDATLYTESDVHPSCKVTAMKCFLLELQDISLESGD | |
| PLGLAG- | ASIHDTVENLIILANNSLSSAGNVTESGCKECEELEEKNIKEFLQSFVHIVQ | |
| SGRSDNR- | MFINTA [symbol] [symbol] IACPPPMSVEHADIWVKSYSLYSRE | |
| SGGG-R_T2A | RYICNSGFKRKAGTSSLTECVLNKATNVAHWTTPSLKCIRDPALVHQRPAPP | |
| 12/21R | S | |
| Chains 3 | DIVMTQTPLSLPVTPGEPASISCRSSQSIVHSNANTYLEWYLQKPGQSPQLL | 657 |
| and 4 | IYKVSNRFSGVPDRFSGSGSGTDFTLKISRVEAEDVGVYYCFQGSHVPWTFG | |
| hB7A_IgkLC | QGTKVEIKRTVAAPSVFIFPPSDEQLKSGTASVVCLLNNFYPREAKVQWKVD | |
| | NALQSGNSQESVTEQDSKDSTYSLSSTLTLSKADYEKHKVYACEVTHQGLSS | |
| | PVTKSFNRGEC | |

P30262939 - Fusion to proIL-15

| | | |
|---|---|---|
| Chains 1 | EVQLVESGGGLVQPGGSLRLSCAASGFTFSRYWMTWVRQAPGKGLEWIGEIN | 658 |
| and 2 | PDSSTANYTPYLKGRFTISRDNAKNSLYLQMNSLRAEDTAVYYCARPVDGYY | |
| 15LR- | DAMDPWGQGTTVTVSSASTKGPSVFPLAPSSKSTSGGTAALGCLVKDYFPEP | |
| 285_hH8VHe_ | VTVSWNSGALTSGVHTFPAVLQSSGLYSLSSVVTVPSSSLGTQTYICNVNHK | |
| IgG1(AAA)_ | PSNTKVDKKVEPKSCDKTHTCPPCPAPEAAGGPSVFLFPPKPKDTLMISRTP | |
| delK-GGS- | EVTCVVVDVSHEDPEVKFNWYVDGVEVHNAKTKPREEQYNSTYRVVSVLTVL | |
| PLGLAG-GGS- | HQDWLNGKEYKCKVSNKALAAPIEKTISKAKGQPREPQVYTLPPSRDELTKN | |
| L_V49D_N77A_ | QVSLTCLVKGFYPSDIAVEWESNGQPENNYKTTPPVLDSDGSFFLYSKLTVD | |
| (S162A)- | KSRWQQGNVFSCSVMHEALHNHYTQKSLSLSPG [symbol] NWVNVIS | |
| GGGS-PLGLAG- | DLKKIEDLIQSMHIDATLYTESDVHPSCKVTAMKCFLLELQDISLESGDASI | |
| SGRSDNR- | HDTVENLIILANNSLSSAGNVTESGCKECEELEEKNIKEFLQSFVHIVQMFI | |
| SGGG-R_T2A | NT [symbol] [symbol] IACPPPMSVEHADIWVKSYSLYSRERYI | |
| | CNSGFKRKAGTSSLTECVLNKATNVAHWTTPSLKCIRDPALVHQRPAPPS | |
| Chains 3 | DIVMTQSPDSLAVSLGERATINCKSSQSLLNWYNQKNYLAWYQQKPGQPPKL | 659 |
| and 4 | LIYGASTRESGVPDRFSGSGSGTDFTLTISSLQAEDVAVYYCQNDHQYPYTF | |
| hH8VLa_IgkLC | GQGTKLEIKRTVAAPSVFIFPPSDEQLKSGTASVVCLLNNFYPREAKVQWKV | |
| | DNALQSGNSQESVTEQDSKDSTYSLSSTLTLSKADYEKHKVYACEVTHQGLS | |
| | SPVTKSFNRGEC | |

P2869362716 - Bi-specific Ab Fusion to anti-CD40 Ab

| | | |
|---|---|---|
| Chains 1 | QVTLKESGPALVKPTQTLTLTCTFSGFSLSTPGMGVWWIRQPPGKALEWLAD | 660 |
| and 2 D3- | IWWDDNKYTNPSLKSRLTISKDTSKNQVVLTMTNMDPVDTATYYCARRANYG | |
| huIgG1HC_ | NPYYAQDYWGQGTTVTVSSASTKGPSVFPLAPSSKSTSGGTAALGCLVKDYF | |
| L234A_L235A_ | PEPVTVSWNSGALTSGVHTFPAVLQSSGLYSLSSVVTVPSSSLGTQTYICNV | |
| P329A- | NHKPSNTKVDKKVEPKSCDKTHTCPPCPAPEAAGGPSVFLFPPKPKDTLMIS | |
| GGGGS- | RTPEVTCVVVDVSHEDPEVKFNWYVDGVEVHNAKTKPREEQYNSTYRVVSVL | |
| CP870893- | TVLHQDWLNGKEYKCKVSNKALAAPIEKTISKAKGQPREPQVYTLPPSRDEL | |
| VL-CL | TKNQVSLTCLVKGFYPSDIAVEWESNGQPENNYKTTPPVLDSDGSFFLYSKL | |
| | TVDKSRWQQGNVFSCSVMHEALHNHYTQKSLSLSPGK [symbol] DIQMTQSPSS | |
| | VSASVGDRVTITCRASQGIYSWLAWYQQKPGKAPNLLIYTASTLQSGVPSRF | |
| | SGSGSGTDFTLTISSLQPEDFATYYCQQANIFPLTFGGGTKVEIKRTVAAPS | |
| | VFIFPPSDEQLKSGTASVVCLLNNFYPREAKVQWKVDNALQSGNSQESVTEQ | |
| | DSKDSTYSLSSTLTLSKADYEKHKVYACEVTHQGLSSPVTKSFNRGEC | |
| Chains 3 | QVQLVQSGAEVKKPGASVKVSCKASGYTFTGYYMHWVRQAPGQGLEWMGWIN | 661 |
| and 4 | PDSGGTNYAQKFQGRVTMTRDTSISTAYMELNRLRSDDTAVYYCARDQPLGY | |
| CP870893- | CTNGVCSYFDYWGQGTLVTVSSASTKGPSVFPLAPCSRSTSESTAALGCLVK | |
| G4Fd | DYFPEPVTVSWNSGALTSGVHTFPAVLQSSGLYSLSSVVTVPSSSLGTKTYT | |
| | CNVDHKPSNTKVDKRV | |
| Chains 5 | DIVMTQTPLSLPVTPGEPASISCRSSQSIVSSWGNTYLEWYLQKPGQSPQLL | 662 |
| and 6 D3- | TYKVSNRFSGVPDRFSGSGSGTDFTLKISRVEAEDVGVYYCFQGSHVPWTFG | |
| Ig-kLC | QGTKVEIKRTVAAPSVFIFPPSDEQLKSGTASVVCLLNNFYPREAKVQWKVD | |
| | NALQSGNSQESVTEQDSKDSTYSLSSTLTLSKADYEKHKVYACEVTHQGLSS | |
| | PVTKSFNRGEC | |

P2870362716 - Bi-specific Ab Fusion to anti-CD40 Ab

| | | |
|---|---|---|
| Chains 1 | QVTLKESGPALVKPTQTLTLTCTFSGFSLSTPGMGVWWIRQPPGKALEWLAD | 663 |
| and 2 D3- | IWWDDNKYTNPSLKSRLTISKDTSKNQVVLTMTNMDPVDTATYYCARRANYG | |
| huIgG1HC_ | NPYYAQDYWGQGTTVTVSSASTKGPSVFPLAPSSKSTSGGTAALGCLVKDYF | |
| L234A_L235A_ | PEPVTVSWNSGALTSGVHTFPAVLQSSGLYSLSSVVTVPSSSLGTQTYICNV | |
| P329A- | NHKPSNTKVDKKVEPKSCDKTHTCPPCPAPEAAGGPSVFLFPPKPKDTLMIS | |
| GGGGSGGGGS- | RTPEVTCVVVDVSHEDPEVKFNWYVDGVEVHNAKTKPREEQYNSTYRVVSVL | |
| CP870893- | TVLHQDWLNGKEYKCKVSNKALAAPIEKTISKAKGQPREPQVYTLPPSRDEL | |
| VL-CL | TKNQVSLTCLVKGFYPSDIAVEWESNGQPENNYKTTPPVLDSDGSFFLYSKL | |
| | TVDKSRWQQGNVFSCSVMHEALHNHYTQKSLSLSPGK [symbol] DIQMT | |
| | QSPSSVSASVGDRVTITCRASQGIYSWLAWYQQKPGKAPNLLIYTASTLQSG | |
| | VPSRFSGSGSGTDFTLTISSLQPEDFATYYCQQANIFPLTFGGGTKVEIKRT | |
| | VAAPSVFIFPPSDEQLKSGTASVVCLLNNFYPREAKVQWKVDNALQSGNSQE | |
| | SVTEQDSKDSTYSLSSTLTLSKADYEKHKVYACEVTHQGLSSPVTKSFNRGE | |
| | C | |
| Chains 3 | QVQLVQSGAEVKKPGASVKVSCKASGYTFTGYYMHWVRQAPGQGLEWMGWIN | 664 |
| and 4 | PDSGGTNYAQKFQGRVTMTRDTSISTAYMELNRLRSDDTAVYYCARDQPLGY | |
| CP870893- | CTNGVCSYFDYWGQGTLVTVSSASTKGPSVFPLAPCSRSTSESTAALGCLVK | |
| G4Fd | DYFPEPVTVSWNSGALTSGVHTFPAVLQSSGLYSLSSVVTVPSSSLGTKTYT | |
| | CNVDHKPSNTKVDKRV | |
| Chains 5 | DIVMTQTPLSLPVTPGEPASISCRSSQSIVSSWGNTYLEWYLQKPGQSPQLL | 665 |
| and 6 D3- | IYKVSNRFSGVPDRFSGSGSGTDFTLKISRVEAEDVGVYYCFQGSHVPWTFG | |
| Ig-kLC | QGTKVEIKRTVAAPSVFIFPPSDEQLKSGTASVVCLLNNFYPREAKVQWKVD | |
| | NALQSGNSQESVTEQDSKDSTYSLSSTLTLSKADYEKHKVYACEVTHQGLSS | |
| | PVTKSFNRGEC | |

P2871362716 - Bi-specific Ab Fusion to anti-CD40 Ab

| | | |
|---|---|---|
| Chains 1 | QVTLKESGPALVKPTQTLTLTCTFSGFSLSTPGMGVWWIRQPPGKALEWLAD | 666 |
| and 2 D3- | IWWDDNKYTNPSLKSRLTISKDTSKNQVVLTMTNMDPVDTATYYCARRANYG | |
| huIgG1HC_ | NPYYAQDYWGQGTTVTVSSASTKGPSVFPLAPSSKSTSGGTAALGCLVKDYF | |
| L234A_L235A_ | PEPVTVSWNSGALTSGVHTFPAVLQSSGLYSLSSVVTVPSSSLGTQTYICNV | |
| P329A- | NHKPSNTKVDKKVEPKSCDKTHTCPPCPAPEAAGGPSVFLFPPKPKDTLMIS | |
| GGGGSGGGGS | RTPEVTCVVVDVSHEDPEVKFNWYVDGVEVHNAKTKPREEQYNSTYRVVSVL | |
| GGGGS- | TVLHQDWLNGKEYKCKVSNKALAAPIEKTISKAKGQPREPQVYTLPPSRDEL | |
| CP870893- | TKNQVSLTCLVKGFYPSDIAVEWESNGQPENNYKTTPPVLDSDGSFFLYSKL | |
| VL-CL | TVDKSRWQQGNVFSCSVMHEALHNHYTQKSLSLSPGK [symbol] | |
| | DIQMTQSPSSVSASVGDRVTITCRASQGIYSWLAWYQQKPGKAPNLLIYTAS | |
| | TLQSGVPSRFSGSGSGTDFTLTISSLQPEDFATYYCQQANIFPLTFGGGTKV | |
| | EIKRTVAAPSVFIFPPSDEQLKSGTASVVCLLNNFYPREAKVQWKVDNALQS | |
| | GNSQESVTEQDSKDSTYSLSSTLTLSKADYEKHKVYACEVTHQGLSSPVTKS | |
| | FNRGEC | |
| Chains 3 | QVQLVQSGAEVKKPGASVKVSCKASGYTFTGYYMHWVRQAPGQGLEWMGWIN | 667 |
| and 4 | PDSGGTNYAQKFQGRVTMTRDTSISTAYMELNRLRSDDTAVYYCARDQPLGY | |
| CP870893- | CTNGVCSYFDYWGQGTLVTVSSASTKGPSVFPLAPCSRSTSESTAALGCLVK | |
| G4Fd | DYFPEPVTVSWNSGALTSGVHTFPAVLQSSGLYSLSSVVTVPSSSLGTKTYT | |
| | CNVDHKPSNTKVDKRV | |
| Chains 5 | DIVMTQTPLSLPVTPGEPASISCRSSQSIVSSWGNTYLEWYLQKPGQSPQLL | 668 |
| and 6 D3- | IYKVSNRFSGVPDRFSGSGSGTDFTLKISRVEAEDVGVYYCFQGSHVPWTFG | |
| Ig-kLC | QGTKVEIKRTVAAPSVFIFPPSDEQLKSGTASVVCLLNNFYPREAKVQWKVD | |
| | NALQSGNSQESVTEQDSKDSTYSLSSTLTLSKADYEKHKVYACEVTHQGLSS | |
| | PVTKSFNRGEC | |

P2851522716 - Bi-specific Ab Fusion to anti-41BB Ab

| | | |
|---|---|---|
| Chains 1 | QVTLKESGPALVKPTQTLTLTCTFSGFSLSTPGMGVWWIRQPPGKALEW | 669 |
| and 2 D3- | LADIWWDDNKYTNPSLKSRLTISKDTSKNQVVLTMTNMDPVDTATYYCA | |
| huIgG1HC_ | RRANYGNPYYAQDYWGQGTTVTVSSASTKGPSVFPLAPSSKSTSGGTAA | |
| L234A_L235A_ | LGCLVKDYFPEPVTVSWNSGALTSGVHTFPAVLQSSGLYSLSSVVTVPS | |
| P329A- | SSLGTQTYICNVNHKPSNTKVDKKVEPKSCDKTHTCPPCPAPEAAGGPS | |
| GGGGSGGGGS | VFLFPPKPKDTLMISRTPEVTCVVVDVSHEDPEVKFNWYVDGVEVHNAK | |
| GGGGS-Uto- | TKPREEQYNSTYRVVSVLTVLHQDWLNGKEYKCKVSNKALAAPIEKTIS | |
| VL-CL | KAKGQPREPQVYTLPPSRDELTKNQVSLTCLVKGFYPSDIAVEWESNGQ | |
| | PENNYKTTPPVLDSDGSFFLYSKLTVDKSRWQQGNVFSCSVMHEALHNH | |
| | YTQKSLSLSPGK [symbol] SYELTQPPSVSVSPGQTASITC | |
| | SGDNIGDQYAHWYQQKPGQSPVLVIYQDKNRPSGIPERFSGSNSGNTAT | |
| | LTISGTQAMDEADYYCATYTGFGSLAVFGGGTKLTVLGQPKAAPSVTLF | |
| | PPSSEELQANKATLVCLISDFYPGAVTVAWKADSSPVKAGVETTTPSKQ | |
| | SNNKYAASSYLSLTPEQWKSHRSYSCQVTHEGSTVEKTVAPTECS | |
| Chains 3 | EVQLVQSGAEVKKPGESLRISCKGSGYSFSTYWISWVRQMPGKGLEWMG | 670 |
| and 4 Uto- | KIYPGDSYTNYSPSFQGQVTISADKSISTAYLQWSSLKASDTAMYYCAR | |
| Fd | GYGIFDYWGQGTLVTVSSASTKGPSVFPLAPCSRSTSESTAALGCLVKD | |
| | YFPEPVTVSWNSGALTSGVHTFPAVLQSSGLYSLSSVVTVPSSSLGTKT | |
| | YTCNVDHKPSNTKVDKRV | |
| Chains 5 | DIVMTQTPLSLPVTPGEPASISCRSSQSIVSSWGNTYLEWYLQKPGQSPQLL | 671 |
| and 6 D3- | IYKVSNRFSGVPDRFSGSGSGTDFTLKISRVEAEDVGVYYCFQGSHVPWTFG | |
| Ig-kLC | QGTKVEIKRTVAAPSVFIFPPSDEQLKSGTASVVCLLNNFYPREAKVQWKVD | |
| | NALQSGNSQESVTEQDSKDSTYSLSSTLTLSKADYEKHKVYACEVTHQGLSS | |
| | PVTKSFNRGEC | |

P2853332716 - Bi-specific Ab Fusion to anti-41BB Ab

| | | |
|---|---|---|
| Chains 1 | QVTLKESGPALVKPTQTLTLTCTFSGFSLSTPGMGVWWIRQPPGKALEW | 672 |
| and 2 D3- | LADIWWDDNKYTNPSLKSRLTISKDTSKNQVVLTMTNMDPVDTATYYCA | |
| huIgG1HC_ | RRANYGNPYYAQDYWGQGTTVTVSSASTKGPSVFPLAPSSKSTSGGTAA | |
| L234A_L235A_ | LGCLVKDYFPEPVTVSWNSGALTSGVHTFPAVLQSSGLYSLSSVVTVPS | |
| P329A- | SSLGTQTYICNVNHKPSNTKVDKKVEPKSCDKTHTCPPCPAPEAAGGPS | |
| GGGGSGGGGS | VFLFPPKPKDTLMISRTPEVTCVVVDVSHEDPEVKFNWYVDGVEVHNAK | |
| GGGGS-Ure- | TKPREEQYNSTYRVVSVLTVLHQDWLNGKEYKCKVSNKALAAPIEKTIS | |
| VL-CL | KAKGQPREPQVYTLPPSRDELTKNQVSLTCLVKGFYPSDIAVEWESNGQ | |
| | PENNYKTTPPVLDSDGSFFLYSKLTVDKSRWQQGNVFSCSVMHEALHNH | |
| | YTQKSLSLSPGK [symbol] EIVLTQSPATLSLSPGERATLS | |
| | CRASQSVSSYLAWYQQKPGQAPRLLIYDASNRATGIPARFSGSGSGTDF | |
| | TLTISSLEPEDFAVYYCQQRSNWPPALTFGGGTKVEIKRTVAAPSVFIF | |
| | PPSDEQLKSGTASVVCLLNNFYPREAKVQWKVDNALQSGNSQESVTEQD | |
| | SKDSTYSLSSTLTLSKADYEKHKVYACEVTHQGLSSPVTKSFNRGEC | |
| Chains 3 | QVQLQQWGAGLLKPSETLSLTCAVYGGSFSGYYWSWIRQSPEKGLEWIGEIN | 673 |
| and 4 Ure- | HGGYVTYNPSLESRVTISVDTSKNQFSLKLSSVTAADTAVYYCARDYGPGNY | |
| Fd | DWYFDLWGRGTLVTVSSASTKGPSVFPLAPCSRSTSESTAALGCLVKDYFPE | |
| | PVTVSWNSGALTSGVHTFPAVLQSSGLYSLSSVVTVPSSSLGTKTYTCNVDH | |
| | KPSNTKVDKRV | |
| Chains 5 | DIVMTQTPLSLPVTPGEPASISCRSSQSIVSSWGNTYLEWYLQKPGQSPQLL | 674 |
| and 6 D3- | TYKVSNRFSGVPDRFSGSGSGTDFTLKISRVEAEDVGVYYCFQGSHVPWTFG | |
| Ig-kLC | QGTKVEIKRTVAAPSVFIFPPSDEQLKSGTASVVCLLNNFYPREAKVQWKVD | |
| | NALQSGNSQESVTEQDSKDSTYSLSSTLTLSKADYEKHKVYACEVTHQGLSS | |
| | PVTKSFNRGEC | |

P2854551808 - Bi-specific Ab Fusion to anti-41BB Ab

| | | |
|---|---|---|
| Chains 1 | EVQLVQSGAEVKKPGESLRISCKGSGYSFSTYWISWVRQMPGKGLEWMG | 675 |
| and 2 Uto- | KIYPGDSYTNYSPSFQGQVTISADKSISTAYLQWSSLKASDTAMYYCAR | |
| IgG1HC_L234A_ | GYGIFDYWGQGTLVTVSSASTKGPSVFPLAPSSKSTSGGTAALGCLVKD | |
| L235A_P329A- | YFPEPVTVSWNSGALTSGVHTFPAVLQSSGLYSLSSVVTVPSSSLGTQT | |
| GGGGSGGGGS | YICNVNHKPSNTKVDKKVEPKSCDKTHTCPPCPAPEAAGGPSVFLFPPK | |
| GGGGS-D3- | PKDTLMISRTPEVTCVVVDVSHEDPEVKFNWYVDGVEVHNAKTKPREEQ | |
| VL-CL | YNSTYRVVSVLTVLHQDWLNGKEYKCKVSNKALAAPIEKTISKAKGQPR | |
| | EPQVYTLPPSRDELTKNQVSLTCLVKGFYPSDIAVEWESNGQPENNYKT | |
| | TPPVLDSDGSFFLYSKLTVDKSRWQQGNVFSCSVMHEALHNHYTQKSLS | |
| | LSPGK [symbol] DIVMTQTPLSLPVTPGEPASISCRSSQSI | |
| | VSSWGNTYLEWYLQKPGQSPQLLIYKVSNRFSGVPDRFSGSGSGTDFTL | |
| | KISRVEAEDVGVYYCFQGSHVPWTFGQGTKVEIKRTVAAPSVFIFPPSD | |
| | EQLKSGTASVVCLLNNFYPREAKVQWKVDNALQSGNSQESVTEQDSKDS | |
| | TYSLSSTLTLSKADYEKHKVYACEVTHQGLSSPVTKSFNRGEC | |
| Chains 3 | QVTLKESGPALVKPTQTLTLTCTFSGFSLSTPGMGVWWIRQPPGKALEW | 676 |
| and 4 D3- | LADIWWDDNKYTNPSLKSRLTISKDTSKNQVVLTMTNMDPVDTATYYCA | |
| Fd | RRANYGNPYYAQDYWGQGTTVTVSSASTKGPSVFPLAPSSKSTSGGTAA | |
| | LGCLVKDYFPEPVTVSWNSGALTSGVHTFPAVLQSSGLYSLSSVVTVPS | |
| | SSLGTQTYICNVNHKPSNTKVDKKVEPKSCDK | |
| Chains 5 | SYELTQPPSVSVSPGQTASITCSGDNIGDQYAHWYQQKPGQSPVLVIYQDKN | 677 |
| and 6 Uto- | RPSGIPERFSGSNSGNTATLTISGTQAMDEADYYCATYTGFGSLAVFGGGTK | |
| Ig-1LC | LTVLGQPKAAPSVTLFPPSSEELQANKATLVCLISDFYPGAVTVAWKADSSP | |
| | VKAGVETTTPSKQSNNKYAASSYLSLTPEQWKSHRSYSCQVTHEGSTVEKTV | |
| | APTECS | |

P2856551800 - Bi-specific Ab Fusion to anti-41BB Ab

| | | |
|---|---|---|
| Chains 1 | QVQLQQWGAGLLKPSETLSLTCAVYGGSFSGYYWSWIRQSPEKGLEWIG | 678 |
| and 2 Ure- | EINHGGYVTYNPSLESRVTISVDTSKNQFSLKLSSVTAADTAVYYCARD | |
| IgG1HC_L234A_ | YGPGNYDWYFDLWGRGTLVTVSSASTKGPSVFPLAPSSKSTSGGTAALG | |
| L235A_P329A- | CLVKDYFPEPVTVSWNSGALTSGVHTFPAVLQSSGLYSLSSVVTVPSSS | |
| GGGGSGGGGS | LGTQTYICNVNHKPSNTKVDKKVEPKSCDKTHTCPPCPAPEAAGGPSVF | |
| GGGGS-D3- | LFPPKPKDTLMISRTPEVTCVVVDVSHEDPEVKFNWYVDGVEVHNAKTK | |
| VL-CL | PREEQYNSTYRVVSVLTVLHQDWLNGKEYKCKVSNKALAAPIEKTISKA | |
| | KGQPREPQVYTLPPSRDELTKNQVSLTCLVKGFYPSDIAVEWESNGQPE | |
| | NNYKTTPPVLDSDGSFFLYSKLTVDKSRWQQGNVFSCSVMHEALHNHYT | |
| | QKSLSLSPGK [symbol] DIVMTQTPLSLPVTPGEPASISCR | |
| | SSQSIVSSWGNTYLEWYLQKPGQSPQLLIYKVSNRFSGVPDRFSGSGSG | |
| | TDFTLKISRVEAEDVGVYYCFQGSHVPWTFGQGTKVEIKRTVAAPSVFI | |
| | FPPSDEQLKSGTASVVCLLNNFYPREAKVQWKVDNALQSGNSQESVTEQ | |
| | DSKDSTYSLSSTLTLSKADYEKHKVYACEVTHQGLSSPVTKSFNRGEC | |
| Chains 3 | QVTLKESGPALVKPTQTLTLTCTFSGFSLSTPGMGVWWIRQPPGKALEW | 679 |
| and 4 D3- | LADIWWDDNKYTNPSLKSRLTISKDTSKNQVVLTMTNMDPVDTATYYCA | |
| Fd | RRANYGNPYYAQDYWGQGTTVTVSSASTKGPSVFPLAPSSKSTSGGTAA | |
| | LGCLVKDYFPEPVTVSWNSGALTSGVHTFPAVLQSSGLYSLSSVVTVPS | |
| | SSLGTQTYICNVNHKPSNTKVDKKVEPKSCDK | |
| Chains 5 | EIVLTQSPATLSLSPGERATLSCRASQSVSSYLAWYQQKPGQAPRLLIYDAS | 680 |
| and 6 Ure- | NRATGIPARFSGSGSGTDFTLTISSLEPEDFAVYYCQQRSNWPPALTFGGGT | |
| Ig-kLC | KVEIKRTVAAPSVFIFPPSDEQLKSGTASVVCLLNNFYPREAKVQWKVDNAL | |
| | QSGNSQESVTEQDSKDSTYSLSSTLTLSKADYEKHKVYACEVTHQGLSSPVT | |
| | KSFNRGEC | |

P27152798 - Fusion to muIL-12

| | | |
|---|---|---|
| Chains 1 | QVTLKESGPALVKPTQTLTLTCTFSGFSLSTPGMGVWWIRQPPGKALEWLAD | 681 |
| and 2 | IWWDDNKYTNPSLKSRLTISKDTSKNQVVLTMTNMDPVDTATYYCARRANYG | |
| hD3_huIgG1_ | NPYYAQDYWGQGTTVTVSSASTKGPSVFPLAPSSKSTSGGTAALGCLVKDYF | |
| L234A_L235A_ | PEPVTVSWNSGALTSGVHTFPAVLQSSGLYSLSSVVTVPSSSLGTQTYICNV | |
| P329A- | NHKPSNTKVDKKVEPKSCDKTHTCPPCPAPEAAGGPSVFLFPPKPKDTLMIS | |
| (GGGGS)3- | RTPEVTCVVVDVSHEDPEVKFNWYVDGVEVHNAKTKPREEQYNSTYRVVSVL | |
| muIL-12- | TVLHQDWLNGKEYKCKVSNKALAAPIEKTISKAKGQPREPQVYTLPPSRDEL | |
| p40- | TKNQVSLTCLVKGFYPSDIAVEWESNGQPENNYKTTPPVLDSDGSFFLYSKL | |
| (GGGGS)3- | TVDKSRWQQGNVFSCSVMHEALHNHYTQKSLSLSPG [symbol] M | |
| p35 | WELEKDVYVVEVDWTPDAPGETVNLTCDTPEEDDITWTSDQRHGVIGSGKTL | |
| | TITVKEFLDAGQYTCHKGGETLSHSHLLLHKKENGIWSTEILKNFKNKTFLK | |
| | CEAPNYSGRFTCSWLVQRNMDLKFNIKSSSSSPDSRAVTCGMASLSAEKVTL | |
| | DQRDYEKYSVSCQEDVTCPTAEETLPIELALEARQQNKYENYSTSFFIRDII | |
| | KPDPPKNLQMKPLKNSQVEVSWEYPDSWSTPHSYFSLKFFVRIQRKKEKMKE | |
| | TEEGCNQKGAFLVEKTSTEVQCKGGNVCVQAQDRYYNSSCSKWACVPCRVRS | |
| | [symbol] RVIPVSGPARCLSQSRNLLKTTDDMVKTAREKLKHYS | |
| | CTAEDIDHEDITRDQTSTLKTCLPLELHKNESCLATRETSSTTRGSCLPPQK | |
| | TSLMMTLCLGSIYEDLKMYQTEFQAINAALQNHNHQQIILDKGMLVAIDELM | |
| | QSLNHNGETLRQKPPVGEADPYRVKMKLCILLHAFSTRVVTINRVMGYLSSA | |
| Chains 3 | DIVMTQTPLSLPVTPGEPASISCRSSQSIVHSNANTYLEWYLQKPGQSPQLL | 682 |
| and 4 | IYKVSNRFSGVPDRFSGSGSGTDFTLKISRVEAEDVGVYYCFQGSHVPWTFG | |
| hB7A-IgkLC | QGTKVEIKRTVAAPSVFIFPPSDEQLKSGTASVVCLLNNFYPREAKVQWKVD | |
| | NALQSGNSQESVTEQDSKDSTYSLSSTLTLSKADYEKHKVYACEVTHQGLSS | |
| | PVTKSFNRGEC | |

P29382939 - Fusion to muIL-12

| | | |
|---|---|---|
| Chains 1 | EVQLVESGGGLVQPGGSLRLSCAASGFTFSRYWMTWVRQAPGKGLEWIGEIN | 683 |
| and 2 | PDSSTANYTPYLKGRFTISRDNAKNSLYLQMNSLRAEDTAVYYCARPVDGYY | |
| hH8VHe_ | DAMDPWGQGTTVTVSSASTKGPSVFPLAPSSKSTSGGTAALGCLVKDYFPEP | |
| huIgG1_L234A_ | VTVSWNSGALTSGVHTFPAVLQSSGLYSLSSVVTVPSSSLGTQTYICNVNHK | |
| L235A_P329A- | PSNTKVDKKVEPKSCDKTHTCPPCPAPEAAGGPSVFLFPPKPKDTLMISRTP | |
| (GGGGS)3- | EVTCVVVDVSHEDPEVKFNWYVDGVEVHNAKTKPREEQYNSTYRVVSVLTVL | |
| muIL-12- | HQDWLNGKEYKCKVSNKALAAPIEKTISKAKGQPREPQVYTLPPSRDELTKN | |
| p40- | QVSLTCLVKGFYPSDIAVEWESNGQPENNYKTTPPVLDSDGSFFLYSKLTVD | |
| (GGGGS)3- | KSRWQQGNVFSCSVMHEALHNHYTQKSLSLSPG [symbol] MWEL | |
| p35 | EKDVYVVEVDWTPDAPGETVNLTCDTPEEDDITWTSDQRHGVIGSGKTLTIT | |
| | VKEFLDAGQYTCHKGGETLSHSHLLLHKKENGIWSTEILKNFKNKTFLKCEA | |
| | PNYSGRFTCSWLVQRNMDLKFNIKSSSSSPDSRAVTCGMASLSAEKVTLDQR | |
| | DYEKYSVSCQEDVTCPTAEETLPIELALEARQQNKYENYSTSFFIRDIIKPD | |
| | PPKNLQMKPLKNSQVEVSWEYPDSWSTPHSYFSLKFFVRIQRKKEKMKETEE | |
| | GCNQKGAFLVEKTSTEVQCKGGNVCVQAQDRYYNSSCSKWACVPCRVRS [symbol] | |
| | [symbol] RVIPVSGPARCLSQSRNLLKTTDDMVKTAREKLKHYSCTA | |
| | EDIDHEDITRDQTSTLKTCLPLELHKNESCLATRETSSTTRGSCLPPQKTSL | |
| | MMTLCLGSIYEDLKMYQTEFQAINAALQNHNHQQIILDKGMLVAIDELMQSL | |
| | NHNGETLRQKPPVGEADPYRVKMKLCILLHAFSTRVVTINRVMGYLSSA | |
| Chains 3 | DIVMTQSPDSLAVSLGERATINCKSSQSLLNWYNQKNYLAWYQQKPGQPPKL | 684 |
| and 4 | LIYGASTRESGVPDRFSGSGSGTDFTLTISSLQAEDVAVYYCQNDHQYPYTF | |
| hH8VLa_ | GQGTKLEIKRTVAAPSVFIFPPSDEQLKSGTASVVCLLNNFYPREAKVQWKV | |
| IgkLC | DNALQSGNSQESVTEQDSKDSTYSLSSTLTLSKADYEKHKVYACEVTHQGLS | |
| | SPVTKSFNRGEC | |

P27152798 - Fusion to huIL-2

| | | |
|---|---|---|
| Chains 1 | QVTLKESGPALVKPTQTLTLTCTFSGFSLSTPGMGVWWIRQPPGKALEWLAD | 685 |
| and 2 | IWWDDNKYTNPSLKSRLTISKDTSKNQVVLTMTNMDPVDTATYYCARRANYG | |
| hD3_huIgG1_ | NPYYAQDYWGQGTTVTVSSASTKGPSVFPLAPSSKSTSGGTAALGCLVKDYF | |
| L234A_ | PEPVTVSWNSGALTSGVHTFPAVLQSSGLYSLSSVVTVPSSSLGTQTYICNV | |
| L235A_P329A- | NHKPSNTKVDKKVEPKSCDKTHTCPPCPAPEAAGGPSVFLFPPKPKDTLMIS | |
| (GGGGS)3- | RTPEVTCVVVDVSHEDPEVKFNWYVDGVEVHNAKTKPREEQYNSTYRVVSVL | |
| huIL- | TVLHQDWLNGKEYKCKVSNKALAAPIEKTISKAKGQPREPQVYTLPPSRDEL | |
| 2_T3A_K35E | TKNQVSLTCLVKGFYPSDIAVEWESNGQPENNYKTTPPVLDSDGSFFLYSKL | |
| | TVDKSRWQQGNVFSCSVMHEALHNHYTQKSLSLSPG [symbol] A | |
| | PASSSTKKTQLQLEHLLLDLQMILNGINNYKNPELTRMLTFKFYMPKKATEL | |
| | KHLQCLEEELKPLEEVLNLAQSKNFHLRPRDLISNINVIVLELKGSETTFMC | |
| | EYADETATIVEFLNRWITFSQSIISTLT | |
| Chains 3 | DIVMTQTPLSLPVTPGEPASISCRSSQSIVHSNANTYLEWYLQKPGQSPQLL | 686 |
| and 4 | IYKVSNRFSGVPDRFSGSGSGTDFTLKISRVEAEDVGVYYCFQGSHVPWTFG | |
| hB7A-IgkLC | QGTKVEIKRTVAAPSVFIFPPSDEQLKSGTASVVCLLNNFYPREAKVQWKVD | |
| | NALQSGNSQESVTEQDSKDSTYSLSSTLTLSKADYEKHKVYACEVTHQGLSS | |
| | PVTKSFNRGEC | |

P29382939 - Fusion to huIL-2

| | | |
|---|---|---|
| Chains 1 | EVQLVESGGGLVQPGGSLRLSCAASGFTFSRYWMTWVRQAPGKGLEWIGEIN | 687 |
| and 2 | PDSSTANYTPYLKGRFTISRDNAKNSLYLQMNSLRAEDTAVYYCARPVDGYY | |
| hH8VHe_ | DAMDPWGQGTTVTVSSASTKGPSVFPLAPSSKSTSGGTAALGCLVKDYFPEP | |
| huIgG1_L234A_ | VTVSWNSGALTSGVHTFPAVLQSSGLYSLSSVVTVPSSSLGTQTYICNVNHK | |
| L235A_P329A- | PSNTKVDKKVEPKSCDKTHTCPPCPAPEAAGGPSVFLFPPKPKDTLMISRTP | |
| (GGGGS)3- | EVTCVVVDVSHEDPEVKFNWYVDGVEVHNAKTKPREEQYNSTYRVVSVLTVL | |
| huIL- | HQDWLNGKEYKCKVSNKALAAPIEKTISKAKGQPREPQVYTLPPSRDELTKN | |
| 2_T3A_K35E | QVSLTCLVKGFYPSDIAVEWESNGQPENNYKTTPPVLDSDGSFFLYSKLTVD | |
| | KSRWQQGNVFSCSVMHEALHNHYTQKSLSLSPG [symbol] APAS | |
| | SSTKKTQLQLEHLLLDLQMILNGINNYKNPELTRMLTFKFYMPKKATELKHL | |
| | QCLEEELKPLEEVLNLAQSKNFHLRPRDLISNINVIVLELKGSETTFMCEYA | |
| | DETATIVEFLNRWITFSQSIISTLT | |
| Chains 3 | DIVMTQSPDSLAVSLGERATINCKSSQSLLNWYNQKNYLAWYQQKPGQPPKL | 688 |
| and 4 | LIYGASTRESGVPDRFSGSGSGTDFTLTISSLQAEDVAVYYCQNDHQYPYTF | |
| hH8VLa_IgkLC | GQGTKLEIKRTVAAPSVFIFPPSDEQLKSGTASVVCLLNNFYPREAKVQWKV | |
| | DNALQSGNSQESVTEQDSKDSTYSLSSTLTLSKADYEKHKVYACEVTHQGLS | |
| | SPVTKSFNRGEC | |

P27152798 - Fusion to huIL-7

| | | |
|---|---|---|
| Chains 1 | QVTLKESGPALVKPTQTLTLTCTFSGFSLSTPGMGVWWIRQPPGKALEWLAD | 689 |
| and 2 | IWWDDNKYTNPSLKSRLTISKDTSKNQVVLTMTNMDPVDTATYYCARRANYG | |
| hD3_huIgG1_ | NPYYAQDYWGQGTTVTVSSASTKGPSVFPLAPSSKSTSGGTAALGCLVKDYF | |
| L234A_L235A_ | PEPVTVSWNSGALTSGVHTFPAVLQSSGLYSLSSVVTVPSSSLGTQTYICNV | |
| P329A- | NHKPSNTKVDKKVEPKSCDKTHTCPPCPAPEAAGGPSVFLFPPKPKDTLMIS | |
| (GGGGS)3- | RTPEVTCVVVDVSHEDPEVKFNWYVDGVEVHNAKTKPREEQYNSTYRVVSVL | |
| huIL-7 | TVLHQDWLNGKEYKCKVSNKALAAPIEKTISKAKGQPREPQVYTLPPSRDEL | |
| | TKNQVSLTCLVKGFYPSDIAVEWESNGQPENNYKTTPPVLDSDGSFFLYSKL | |
| | TVDKSRWQQGNVFSCSVMHEALHNHYTQKSLSLSPG [symbol] D | |
| | CDIEGKDGKQYESVLMVSIDQLLDSMKEIGSNCLNNEFNFFKRHICDANKEG | |
| | MFLFRAARKLRQFLKMNSTGDFDLHLLKVSEGTTILLNCTGQVKGRKPAALG | |
| | AAQPTKSLEENKSLKEQKKLNDLCFLKRLLQEIKTCWNKILMGTKEH | |
| Chains 3 | DIVMTQTPLSLPVTPGEPASISCRSSQSIVHSNANTYLEWYLQKPGQSPQLL | 690 |
| and 4 | IYKVSNRFSGVPDRFSGSGSGTDFTLKISRVEAEDVGVYYCFQGSHVPWTFG | |
| hB7A-IgkLC | QGTKVEIKRTVAAPSVFIFPPSDEQLKSGTASVVCLLNNFYPREAKVQWKVD | |
| | NALQSGNSQESVTEQDSKDSTYSLSSTLTLSKADYEKHKVYACEVTHQGLSS | |
| | PVTKSFNRGEC | |

P29382939 - Fusion to huIL-7

| | | |
|---|---|---|
| Chains 1 | EVQLVESGGGLVQPGGSLRLSCAASGFTFSRYWMTWVRQAPGKGLEWIGEIN | 691 |
| and 2 | PDSSTANYTPYLKGRFTISRDNAKNSLYLQMNSLRAEDTAVYYCARPVDGYY | |
| hH8VHe_ | DAMDPWGQGTTVTVSSASTKGPSVFPLAPSSKSTSGGTAALGCLVKDYFPEP | |
| huIgG1_L234A_ | VTVSWNSGALTSGVHTFPAVLQSSGLYSLSSVVTVPSSSLGTQTYICNVNHK | |
| L235A_P329A- | PSNTKVDKKVEPKSCDKTHTCPPCPAPEAAGGPSVFLFPPKPKDTLMISRTP | |
| (GGGGS)3- | EVTCVVVDVSHEDPEVKFNWYVDGVEVHNAKTKPREEQYNSTYRVVSVLTVL | |
| huIL-7 | HQDWLNGKEYKCKVSNKALAAPIEKTISKAKGQPREPQVYTLPPSRDELTKN | |
| | QVSLTCLVKGFYPSDIAVEWESNGQPENNYKTTPPVLDSDGSFFLYSKLTVD | |
| | KSRWQQGNVFSCSVMHEALHNHYTQKSLSLSPG [symbol] DCDI | |
| | EGKDGKQYESVLMVSIDQLLDSMKEIGSNCLNNEFNFFKRHICDANKEGMFL | |
| | FRAARKLRQFLKMNSTGDFDLHLLKVSEGTTILLNCTGQVKGRKPAALGAAQ | |
| | PTKSLEENKSLKEQKKLNDLCFLKRLLQEIKTCWNKILMGTKEH | |
| Chains 3 | DIVMTQSPDSLAVSLGERATINCKSSQSLLNWYNQKNYLAWYQQKPGQPPKL | 692 |
| and 4 | LIYGASTRESGVPDRFSGSGSGTDFTLTISSLQAEDVAVYYCQNDHQYPYTF | |
| hH8VLa_IgkLC | GQGTKLEIKRTVAAPSVFIFPPSDEQLKSGTASVVCLLNNFYPREAKVQWKV | |
| | DNALQSGNSQESVTEQDSKDSTYSLSSTLTLSKADYEKHKVYACEVTHQGLS | |
| | SPVTKSFNRGEC | |

P27152798 - Fusion to huIL-15

| | | |
|---|---|---|
| Chains 1 | QVTLKESGPALVKPTQTLTLTCTFSGFSLSTPGMGVWWIRQPPGKALEWLAD | 693 |
| and 2 | IWWDDNKYTNPSLKSRLTISKDTSKNQVVLTMTNMDPVDTATYYCARRANYG | |
| hD3_huIgG1_ | NPYYAQDYWGQGTTVTVSSASTKGPSVFPLAPSSKSTSGGTAALGCLVKDYF | |
| L234A_L235A_ | PEPVTVSWNSGALTSGVHTFPAVLQSSGLYSLSSVVTVPSSSLGTQTYICNV | |
| P329A- | NHKPSNTKVDKKVEPKSCDKTHTCPPCPAPEAAGGPSVFLFPPKPKDTLMIS | |
| (GGGGS)3- | RTPEVTCVVVDVSHEDPEVKFNWYVDGVEVHNAKTKPREEQYNSTYRVVSVL | |
| huIL-15 | TVLHQDWLNGKEYKCKVSNKALAAPIEKTISKAKGQPREPQVYTLPPSRDEL | |
| | TKNQVSLTCLVKGFYPSDIAVEWESNGQPENNYKTTPPVLDSDGSFFLYSKL | |
| | TVDKSRWQQGNVFSCSVMHEALHNHYTQKSLSLSPG [symbol] N | |
| | WVNVISDLKKIEDLIQSMHIDATLYTESDVHPSCKVTAMKCFLLELQVISLE | |
| | SGDASIHDTVENLIILANNSLSSNGNVTESGCKECEELEEKNIKEFLQSFVH | |
| | IVQMFINTS | |
| Chains 3 | DIVMTQTPLSLPVTPGEPASISCRSSQSIVHSNANTYLEWYLQKPGQSPQLL | 694 |
| and 4 | IYKVSNRFSGVPDRFSGSGSGTDFTLKISRVEAEDVGVYYCFQGSHVPWTFG | |
| hB7A-IgkLC | QGTKVEIKRTVAAPSVFIFPPSDEQLKSGTASVVCLLNNFYPREAKVQWKVD | |
| | NALQSGNSQESVTEQDSKDSTYSLSSTLTLSKADYEKHKVYACEVTHQGLSS | |
| | PVTKSFNRGEC | |

P29382939 - Fusion to huIL-15

| | | |
|---|---|---|
| Chains 1 | EVQLVESGGGLVQPGGSLRLSCAASGFTFSRYWMTWVRQAPGKGLEWIGEIN | 695 |
| and 2 | PDSSTANYTPYLKGRFTISRDNAKNSLYLQMNSLRAEDTAVYYCARPVDGYY | |
| hH8VHe_ | DAMDPWGQGTTVTVSSASTKGPSVFPLAPSSKSTSGGTAALGCLVKDYFPEP | |
| huIgG1_L234A_ | VTVSWNSGALTSGVHTFPAVLQSSGLYSLSSVVTVPSSSLGTQTYICNVNHK | |
| L235A_P329A- | PSNTKVDKKVEPKSCDKTHTCPPCPAPEAAGGPSVFLFPPKPKDTLMISRTP | |
| (GGGGS)3- | EVTCVVVDVSHEDPEVKFNWYVDGVEVHNAKTKPREEQYNSTYRVVSVLTVL | |
| huIL-15 | HQDWLNGKEYKCKVSNKALAAPIEKTISKAKGQPREPQVYTLPPSRDELTKN | |
| | QVSLTCLVKGFYPSDIAVEWESNGQPENNYKTTPPVLDSDGSFFLYSKLTVD | |
| | KSRWQQGNVFSCSVMHEALHNHYTQKSLSLSPG [symbol] NWVN | |
| | VISDLKKIEDLIQSMHIDATLYTESDVHPSCKVTAMKCFLLELQVISLESGD | |
| | ASIHDTVENLIILANNSLSSNGNVTESGCKECEELEEKNIKEFLQSFVHIVQ | |
| | MFINTS | |
| Chains 3 | DIVMTQSPDSLAVSLGERATINCKSSQSLLNWYNQKNYLAWYQQKPGQPPKL | 696 |
| and 4 | LIYGASTRESGVPDRFSGSGSGTDFTLTISSLQAEDVAVYYCQNDHQYPYTF | |
| hH8VLa_IgkLC | GQGTKLEIKRTVAAPSVFIFPPSDEQLKSGTASVVCLLNNFYPREAKVQWKV | |
| | DNALQSGNSQESVTEQDSKDSTYSLSSTLTLSKADYEKHKVYACEVTHQGLS | |
| | SPVTKSFNRGEC | |

P27152798 - Fusion to huIL-21

| | | |
|---|---|---|
| Chains 1 | QVTLKESGPALVKPTQTLTLTCTFSGFSLSTPGMGVWWIRQPPGKALEWLAD | 697 |
| and 2 | IWWDDNKYTNPSLKSRLTISKDTSKNQVVLTMTNMDPVDTATYYCARRANYG | |
| hD3_huIgG1_ | NPYYAQDYWGQGTTVTVSSASTKGPSVFPLAPSSKSTSGGTAALGCLVKDYF | |
| L234A_L235A_ | PEPVTVSWNSGALTSGVHTFPAVLQSSGLYSLSSVVTVPSSSLGTQTYICNV | |
| P329A- | NHKPSNTKVDKKVEPKSCDKTHTCPPCPAPEAAGGPSVFLFPPKPKDTLMIS | |
| (GGGGS)3- | RTPEVTCVVVDVSHEDPEVKFNWYVDGVEVHNAKTKPREEQYNSTYRVVSVL | |
| huIL-21 | TVLHQDWLNGKEYKCKVSNKALAAPIEKTISKAKGQPREPQVYTLPPSRDEL | |
| | TKNQVSLTCLVKGFYPSDIAVEWESNGQPENNYKTTPPVLDSDGSFFLYSKL | |
| | TVDKSRWQQGNVFSCSVMHEALHNHYTQKSLSLSPG [symbol] Q | |
| | GQDRHMIRMRQLIDIVDQLKNYVNDLVPEFLPAPEDVETNCEWSAFSCFQKA | |
| | QLKSANTGNNERIINVSIKKLKRKPPSTNAGRRQKHRLTCPSCDSYEKKPPK | |
| | EFLERFKSLLQKMIHQHLSSRTHGSEDS | |
| Chains 3 | DIVMTQTPLSLPVTPGEPASISCRSSQSIVHSNANTYLEWYLQKPGQSPQLL | 698 |
| and 4 | IYKVSNRFSGVPDRFSGSGSGTDFTLKISRVEAEDVGVYYCFQGSHVPWTFG | |
| hB7A-IgkLC | QGTKVEIKRTVAAPSVFIFPPSDEQLKSGTASVVCLLNNFYPREAKVQWKVD | |
| | NALQSGNSQESVTEQDSKDSTYSLSSTLTLSKADYEKHKVYACEVTHQGLSS | |
| | PVTKSFNRGEC | |

P29382939 - Fusion to huIL-21

| | | |
|---|---|---|
| Chains 1 | EVQLVESGGGLVQPGGSLRLSCAASGFTFSRYWMTWVRQAPGKGLEWIGEIN | 699 |
| and 2 | PDSSTANYTPYLKGRFTISRDNAKNSLYLQMNSLRAEDTAVYYCARPVDGYY | |
| hH8VHe_ | DAMDPWGQGTTVTVSSASTKGPSVFPLAPSSKSTSGGTAALGCLVKDYFPEP | |
| huIgG1_L234A_ | VTVSWNSGALTSGVHTFPAVLQSSGLYSLSSVVTVPSSSLGTQTYICNVNHK | |
| L235A_P329A- | PSNTKVDKKVEPKSCDKTHTCPPCPAPEAAGGPSVFLFPPKPKDTLMISRTP | |
| (GGGGS)3- | EVTCVVVDVSHEDPEVKFNWYVDGVEVHNAKTKPREEQYNSTYRVVSVLTVL | |
| huIL-21 | HQDWLNGKEYKCKVSNKALAAPIEKTISKAKGQPREPQVYTLPPSRDELTKN | |
| | QVSLTCLVKGFYPSDIAVEWESNGQPENNYKTTPPVLDSDGSFFLYSKLTVD | |
| | KSRWQQGNVFSCSVMHEALHNHYTQKSLSLSPG [symbol] QGQD | |
| | RHMIRMRQLIDIVDQLKNYVNDLVPEFLPAPEDVETNCEWSAFSCFQKAQLK | |
| | SANTGNNERIINVSIKKLKRKPPSTNAGRRQKHRLTCPSCDSYEKKPPKEFL | |
| | ERFKSLLQKMIHQHLSSRTHGSEDS | |
| Chains 3 | DIVMTQSPDSLAVSLGERATINCKSSQSLLNWYNQKNYLAWYQQKPGQPPKL | 700 |
| and 4 | LIYGASTRESGVPDRFSGSGSGTDFTLTISSLQAEDVAVYYCQNDHQYPYTF | |
| hH8VLa_IgkLC | GQGTKLEIKRTVAAPSVFIFPPSDEQLKSGTASVVCLLNNFYPREAKVQWKV | |
| | DNALQSGNSQESVTEQDSKDSTYSLSSTLTLSKADYEKHKVYACEVTHQGLS | |
| | SPVTKSFNRGEC | |

P27152798 - Fusion to huIFNα

| | | |
|---|---|---|
| Chains 1 | QVTLKESGPALVKPTQTLTLTCTFSGFSLSTPGMGVWWIRQPPGKALEWLAD | 701 |
| and 2 | IWWDDNKYTNPSLKSRLTISKDTSKNQVVLTMTNMDPVDTATYYCARRANYG | |
| hD3_huIgG1_ | NPYYAQDYWGQGTTVTVSSASTKGPSVFPLAPSSKSTSGGTAALGCLVKDYF | |
| L234A_L235A_ | PEPVTVSWNSGALTSGVHTFPAVLQSSGLYSLSSVVTVPSSSLGTQTYICNV | |
| P329A- | NHKPSNTKVDKKVEPKSCDKTHTCPPCPAPEAAGGPSVFLFPPKPKDTLMIS | |
| (GGGGS)3- | RTPEVTCVVVDVSHEDPEVKFNWYVDGVEVHNAKTKPREEQYNSTYRVVSVL | |
| huIFNα | TVLHQDWLNGKEYKCKVSNKALAAPIEKTISKAKGQPREPQVYTLPPSRDEL | |
| | TKNQVSLTCLVKGFYPSDIAVEWESNGQPENNYKTTPPVLDSDGSFFLYSKL | |
| | TVDKSRWQQGNVFSCSVMHEALHNHYTQKSLSLSPG [symbol] C | |
| | DLPQTHSLGSRRTLMLLAQMRRISLFSCLKDRHDFGFPQEEFGNQFQKAETI | |
| | PVLHEMIQQIFNLFSTKDSSAAWDETLLDKFYTELYQQLNDLEACVIQGVGV | |
| | TETPLMKEDSILAVRKYFQRITLYLKEKKYSPCAWEVVRAEIMRSFSLSTNL | |
| | QESLRSKE | |
| Chains 3 | DIVMTQTPLSLPVTPGEPASISCRSSQSIVHSNANTYLEWYLQKPGQSPQLL | 702 |
| and 4 | IYKVSNRFSGVPDRFSGSGSGTDFTLKISRVEAEDVGVYYCFQGSHVPWTFG | |
| hB7A-IgkLC | QGTKVEIKRTVAAPSVFIFPPSDEQLKSGTASVVCLLNNFYPREAKVQWKVD | |
| | NALQSGNSQESVTEQDSKDSTYSLSSTLTLSKADYEKHKVYACEVTHQGLSS | |
| | PVTKSFNRGEC | |

P29382939 - Fusion to huIFNα

| | | |
|---|---|---|
| Chains 1 | EVQLVESGGGLVQPGGSLRLSCAASGFTFSRYWMTWVRQAPGKGLEWIGEIN | 703 |
| and 2 | PDSSTANYTPYLKGRFTISRDNAKNSLYLQMNSLRAEDTAVYYCARPVDGYY | |
| hH8VHe_ | DAMDPWGQGTTVTVSSASTKGPSVFPLAPSSKSTSGGTAALGCLVKDYFPEP | |
| huIgG1_L234A_ | VTVSWNSGALTSGVHTFPAVLQSSGLYSLSSVVTVPSSSLGTQTYICNVNHK | |
| L235A_P329A- | PSNTKVDKKVEPKSCDKTHTCPPCPAPEAAGGPSVFLFPPKPKDTLMISRTP | |
| (GGGGS)3- | EVTCVVVDVSHEDPEVKFNWYVDGVEVHNAKTKPREEQYNSTYRVVSVLTVL | |
| huIFNα | HQDWLNGKEYKCKVSNKALAAPIEKTISKAKGQPREPQVYTLPPSRDELTKN | |
| | QVSLTCLVKGFYPSDIAVEWESNGQPENNYKTTPPVLDSDGSFFLYSKLTVD | |
| | KSRWQQGNVFSCSVMHEALHNHYTQKSLSLSPG [symbol] CDLP | |
| | QTHSLGSRRTLMLLAQMRRISLFSCLKDRHDFGFPQEEFGNQFQKAETIPVL | |
| | HEMIQQIFNLFSTKDSSAAWDETLLDKFYTELYQQLNDLEACVIQGVGVTET | |
| | PLMKEDSILAVRKYFQRITLYLKEKKYSPCAWEVVRAEIMRSFSLSTNLQES | |
| | LRSKE | |
| Chains 3 | DIVMTQSPDSLAVSLGERATINCKSSQSLLNWYNQKNYLAWYQQKPGQPPKL | 704 |
| and 4 | LIYGASTRESGVPDRFSGSGSGTDFTLTISSLQAEDVAVYYCQNDHQYPYTF | |
| hH8VLa_IgkLC | GQGTKLEIKRTVAAPSVFIFPPSDEQLKSGTASVVCLLNNFYPREAKVQWKV | |
| | DNALQSGNSQESVTEQDSKDSTYSLSSTLTLSKADYEKHKVYACEVTHQGLS | |
| | SPVTKSFNRGEC | |

[0646] Thus, in certain embodiments, a fusion protein, including a bi-specific antibody, comprises, consists, or consists essentially of an amino acid sequence that is at least 80, 85, 90, 95, 98, or 100% identical to a sequence selected from Table S10.

[0647] Methods of Use and Pharmaceutical Compositions

[0648] Certain embodiments include methods of treating, ameliorating the symptoms of, and/or reducing the progression of, a disease or condition in a subject in need thereof, comprising administering to the subject at least one fusion protein or improved antibody, or antigen-binding fragment thereof, as described herein. Also included are methods of enhancing an immune response in a subject, comprising administering to the subject at least one fusion protein, wherein the effector domain of the fusion protein has immune cell-stimulatory activity, as described herein. Certain embodiments include methods of reducing an immune response in a subject, comprising administering to the subject at least one fusion protein, wherein the effector domain of the fusion protein has immune cell-inhibitory activity, as described herein. In particular embodiments, the disease is selected from one or more of a cancer, a viral infection, and an immune disorder, including autoimmune and inflammatory disorders.

[0649] In some embodiments, following administration, the fusion protein binds to high density denatured collagen in a target tissue, and accumulates in that target tissue. The accumulation of the fusion protein increases the local concentration and thus the biological activity of the effector domain in a spatially-regulated way. In this regard, even though collagen remodeling is an integral part of normal tissue renewal, excessive amount of remodeling activity is involved in cancers, arthritis, wound healing, fibrosis, and many other pathological conditions (see, for example, Li et al., J Vis Exp. (83):e51052, 2014. doi:10.3791/51052). Thus, denatured tissue collagen is a biomarker of tissue remodeling or damage, for example, of the type that occurs in pathologically-inflamed tissue, infected tissue, or at a tumor site. In particular embodiments, the accumulation and increased concentration of the fusion protein, and thus the increased activity of the effector domain, occurs in a cancer cell or cancer tissue, or a virally-infected cell or virally-infected tissue.

[0650] In some instances, the fusion protein has at least one immune-stimulatory activity. In some embodiments, the fusion protein has at least one immune-inhibitory activity. In particular embodiments, the fusion protein has at least one cytocidal activity, for example, against an immune cell or a cancer cell. In particular embodiments, the immune cell is selected from one or more of a T cell, a B cell, a natural killer cell, a monocyte, and a macrophage.

[0651] In some embodiments, administration of a fusion protein increases an immune response in the subject by about or at least about 5, 10, 15, 20, 25, 30, 35, 40, 45, 50, 60, 70, 80, 90, 100, 200, 300, 400, 500, 600, 700, 800, 900, 1000, 2000% or more, relative to a control. In some instances, the immune response is an anti-cancer or anti-viral immune response. Any one or more of the effector domains described herein can be used to increase an immune response.

[0652] In some embodiments, administration of a fusion protein reduces an immune response in the subject by about or at least about 5, 10, 15, 20, 25, 30, 35, 40, 45, 50, 60, 70, 80, 90, 100, 200, 300, 400, 500, 600, 700, 800, 900, 1000, 2000% or more, relative to a control. In some instances, the immune response is a pathological or disease-associated autoimmune or inflammatory response. In some embodiments, the effector domain for reducing an immune response comprises an IL-10 polypeptide.

[0653] In some embodiments, administration of a fusion protein increases cell-killing or cytocidal activity in the subject by about or at least about 5, 10, 15, 20, 25, 30, 35, 40, 45, 50, 60, 70, 80, 90, 100, 200, 300, 400, 500, 600, 700, 800, 900, 1000, 2000% or more, relative to a control. In some embodiments, wherein the cell-killing is cancer cell-killing or virally-infected cell-killing. Any one or more of the effector domains described herein can be used to increase cell-killing or cytocidal activity, directly or indirect (e.g., by increasing an anti-cancer or anti-viral immune response).

[0654] In some embodiments, the disease is a cancer, that is, the subject in need thereof has or is suspected of having a cancer. Certain embodiments thus include methods of treating, ameliorating the symptoms of, or inhibiting the progression of, a cancer in a subject in need thereof, comprising administering to the subject at least one fusion protein, as described herein. In particular embodiments, the cancer is a primary cancer or a metastatic cancer. In specific embodiments, the cancer is selected from one or more of melanoma (optionally metastatic melanoma), kidney cancer (optionally renal cell carcinoma), pancreatic cancer, bone cancer, prostate cancer, small cell lung cancer, non-small cell lung cancer (NSCLC), mesothelioma, leukemia (optionally lymphocytic leukemia, chronic myelogenous leukemia, acute myeloid leukemia, or relapsed acute myeloid leukemia), multiple myeloma, lymphoma, hepatoma (hepatocellular carcinoma), sarcoma, B-cell malignancy, breast cancer, ovarian cancer, colorectal cancer, glioma, glioblastoma multiforme, meningioma, pituitary adenoma, vestibular schwannoma, primary CNS lymphoma, primitive neuroectodermal tumor (medulloblastoma), bladder cancer, uterine cancer, esophageal cancer, brain cancer, head and neck cancers, cervical cancer, testicular cancer, thyroid cancer, and stomach cancer.

[0655] In some embodiments, as noted above, the cancer is a metastatic cancer. Further to the above cancers, exemplary metastatic cancers include, without limitation, bladder cancers which have metastasized to the bone, liver, and/or lungs; breast cancers which have metastasized to the bone, brain, liver, and/or lungs; colorectal cancers which have metastasized to the liver, lungs, and/or peritoneum; kidney cancers which have metastasized to the adrenal glands, bone, brain, liver, and/or lungs; lung cancers which have metastasized to the adrenal glands, bone, brain, liver, and/or other lung sites; melanomas which have metastasized to the bone, brain, liver, lung, and/or skin/muscle; ovarian cancers which have metastasized to the liver, lung, and/or peritoneum; pancreatic cancers which have metastasized to the liver, lung, and/or peritoneum; prostate cancers which have metastasized to the adrenal glands, bone, liver, and/or lungs; stomach cancers which have metastasized to the liver, lung, and/or peritoneum; thyroid cancers which have metastasized to the bone, liver, and/or lungs; and uterine cancers which have metastasized to the bone, liver, lung, peritoneum, and/or vagina; among others.

[0656] The methods for treating cancers can be combined with other therapeutic modalities. For example, a combination therapy described herein can be administered to a subject before, during, or after other therapeutic interventions, including symptomatic care, radiotherapy, surgery, transplantation, hormone therapy, photodynamic therapy, antibiotic therapy, or any combination thereof. Symptomatic care includes administration of corticosteroids, to reduce cerebral edema, headaches, cognitive dysfunction, and emesis, and administration of anti-convulsants, to reduce seizures. Radiotherapy includes whole-brain irradiation, fractionated radiotherapy, and radiosurgery, such as stereotactic radiosurgery, which can be further combined with traditional surgery.

[0657] Certain embodiments thus include combination therapies for treating cancers, including methods of treating ameliorating the symptoms of, or inhibiting the progression of, a cancer in a subject in need thereof, comprising administering to the subject at least one fusion protein described herein in combination with at least one additional agent, for example, cancer immunotherapy agent, a chemotherapeutic agent, a hormonal therapeutic agent, and/or a kinase inhibitor. In some embodiments, administering the at least one fusion protein enhances the susceptibility of the cancer to the additional agent (for example, cancer immunotherapy agent, chemotherapeutic agent, hormonal therapeutic agent, and/or kinase inhibitor) by about or at least about 5, 10, 15, 20, 25, 30, 35, 40, 45, 50, 60, 70, 80, 90, 100, 200, 300, 400, 500, 600, 700, 800, 900, 1000, 2000% or more relative to the additional agent alone.

[0658] Certain combination therapies employ one or more cancer immunotherapy agents. In certain instances, an immunotherapy agent modulates the immune response of a subject, for example, to increase or maintain a cancer-related or cancer-specific immune response, and thereby results in increased immune cell inhibition or reduction of cancer cells. Exemplary immunotherapy agents include polypeptides, for example, antibodies and antigen-binding fragments thereof, ligands, and small peptides, and mixtures thereof. Also include as immunotherapy agents are small molecules, cells (e.g., immune cells such as T-cells), various cancer vaccines, gene therapy or other polynucleotide-based agents, including viral agents such as oncolytic viruses, and others known in the art. Thus, in certain embodiments, the cancer immunotherapy agent is selected from one or more of immune checkpoint modulatory agents, cancer vaccines, oncolytic viruses, cytokines, and a cell-based immunotherapies.

[0659] In certain embodiments, the cancer immunotherapy agent is an immune checkpoint modulatory agent. Particular examples include “antagonists” of one or more inhibitory immune checkpoint molecules, and “agonists” of one or more stimulatory immune checkpoint molecules. Generally, immune checkpoint molecules are components of the immune system that either turn up a signal (co-stimulatory molecules) or turn down a signal, the targeting of which has therapeutic potential in cancer because cancer cells can perturb the natural function of immune checkpoint molecules (see, e.g., Sharma and Allison, Science. 348:56-61, 2015; Topalian et al., Cancer Cell. 27:450-461, 2015; Pardoll, Nature Reviews Cancer. 12:252-264, 2012). In some embodiments, the immune checkpoint modulatory agent (e.g., antagonist, agonist) “binds” or “specifically binds” to the one or more immune checkpoint molecules, as described herein.

[0660] In particular embodiments, the immune checkpoint modulatory agent is a polypeptide or peptide. The terms “peptide” and “polypeptide” are used interchangeably herein, however, in certain instances, the term “peptide” can refer to shorter polypeptides, for example, polypeptides that consist of about 2, 3, 4, 5, 6, 7, 8, 9, 10, 11, 12, 13, 14, 15, 16, 17, 18, 19, 20, 25, 30, 35, 40, 45, or 50 amino acids, including all integers and ranges (e.g., 5-10, 8-12, 10-15) in between. Polypeptides and peptides can be composed of naturally-occurring amino acids and/or non-naturally occurring amino acids, as described herein

[0661] Antibodies are also included as polypeptides. Thus, in some embodiments, the immune checkpoint modulatory polypeptide agent is an antibody or “antigen-binding fragment thereof”, as described elsewhere herein.

[0662] In some embodiments, the agent is or comprises a “ligand,” for example, a natural ligand, of the immune checkpoint molecule. A “ligand” refers generally to a substance or molecule that forms a complex with a target molecule (e.g., biomolecule) to serve a biological purpose, and includes a “protein ligand,” which generally produces a signal by binding to a site on a target molecule or target protein. Thus, certain agents are protein ligands that, in nature, bind to an immune checkpoint molecule and produce a signal. Also included are “modified ligands,” for example, protein ligands that are fused to a pharmacokinetic modifier, for example, an Fc region derived from an immunoglobulin.

[0663] The binding properties of polypeptides can be quantified using methods well known in the art (see Davies et al., Annual Rev. Biochem. 59:439-473, 1990). In some embodiments, a polypeptide specifically binds to a target molecule, for example, an immune checkpoint molecule or an epitope thereof, with an equilibrium dissociation constant that is about or ranges from about ≤10-7 to about 10-8 M. In some embodiments, the equilibrium dissociation constant is about or ranges from about ≤10-9 M to about ≤10-10 M. In certain illustrative embodiments, the polypeptide has an affinity (Kd or EC₅₀) for a target described herein (to which it specifically binds) of about, at least about, or less than about, 0.01, 0.05, 0.1, 0.2, 0.3, 0.4, 0.5, 0.6, 0.7, 0.8, 0.9, 1, 2, 3, 4, 5, 6, 7, 8, 9, 10, 11, 12, 13, 14, 15, 16, 17, 18, 19, 20, 21, 22, 23, 24, 25, 26, 27, 28, 29, 30, 40, or 50 nM.

[0664] In some embodiments, the agent is a “small molecule,” which refers to an organic compound that is of synthetic or biological origin (biomolecule), but is typically not a polymer. Organic compounds refer to a large class of chemical compounds whose molecules contain carbon, typically excluding those that contain only carbonates, simple oxides of carbon, or cyanides. A “biomolecule” refers generally to an organic molecule that is produced by a living organism, including large polymeric molecules (biopolymers) such as peptides, polysaccharides, and nucleic acids as well, and small molecules such as primary secondary metabolites, lipids, phospholipids, glycolipids, sterols, glycerolipids, vitamins, and hormones. A “polymer” refers generally to a large molecule or macromolecule composed of repeating structural units, which are typically connected by covalent chemical bond.

[0665] In certain embodiments, a small molecule has a molecular weight of about or less than about 1000-2000 Daltons, typically between about 300 and 700 Daltons, and including about or less than about 50, 100, 150, 200, 250, 300, 350, 400, 450, 500, 550, 500, 650, 600, 750, 700, 850, 800, 950, 1000 or 2000 Daltons.

[0666] Certain small molecules can have the “specific binding” characteristics described for herein polypeptides such as antibodies. For instance, in some embodiments a small molecule specifically binds to a target, for example, an immune checkpoint molecule, with a binding affinity (Kd or EC₅₀) of about, at least about, or less than about, 0.01, 0.05, 0.1, 0.2, 0.3, 0.4, 0.5, 0.6, 0.7, 0.8, 0.9, 1, 2, 3, 4, 5, 6, 7, 8, 9, 10, 11, 12, 13, 14, 15, 16, 17, 18, 19, 20, 21, 22, 23, 24, 25, 26, 27, 28, 29, 30, 40, or 50 nM.

[0667] In some embodiments, the immune checkpoint modulatory agent is an antagonist or inhibitor of one or more inhibitory immune checkpoint molecules. Exemplary inhibitory immune checkpoint molecules include Programmed Death-Ligand 1 (PD-L1), Programmed Death-Ligand 2 (PD-L2), Programmed Death 1 (PD-1), Cytotoxic T-Lymphocyte-Associated protein 4 (CTLA-4), Indoleamine 2,3-dioxygenase (IDO), tryptophan 2,3-dioxygenase (TDO), T-cell Immunoglobulin domain and Mucin domain 3 (TIM-3), Lymphocyte Activation Gene-3 (LAG-3), V-domain Ig suppressor of T cell activation (VISTA), B and T Lymphocyte Attenuator (BTLA), CD160, and T-cell immunoreceptor with Ig and ITIM domains (TIGIT).

[0668] In certain embodiments, the agent is a PD-1 (receptor) antagonist or inhibitor, the targeting of which has been shown to restore immune function in the tumor environment (see, e.g., Phillips et al., Int Immunol. 27:39-46, 2015). PD-1 is a cell surface receptor that belongs to the immunoglobulin superfamily and is expressed on T cells and pro-B cells. PD-1 interacts with two ligands, PD-L1 and PD-L2. PD-1 functions as an inhibitory immune checkpoint molecule, for example, by reducing or preventing the activation of T-cells, which in turn reduces autoimmunity and promotes self-tolerance. The inhibitory effect of PD-1 is accomplished at least in part through a dual mechanism of promoting apoptosis in antigen specific T-cells in lymph nodes while also reducing apoptosis in regulatory T cells (suppressor T cells). Some examples of PD-1 antagonists or inhibitors include an antibody or antigen-binding fragment or small molecule that specifically binds to PD-1 and reduces one or more of its immune-suppressive activities, for example, its downstream signaling or its interaction with PD-L1. Specific examples of PD-1 antagonists or inhibitors include the antibodies nivolumab, pembrolizumab, PDR001, MK-3475, AMP-224, AMP-514, and pidilizumab, and antigen-binding fragments thereof (see, e.g., U.S. Pat. Nos. 8,008,449; 8,993,731; 9,073,994; 9,084,776; 9,102,727; 9,102,728; 9,181,342; 9,217,034; 9,387,247; 9,492,539; 9,492,540; and U.S. Application Nos. 2012/0039906; 2015/0203579).

[0669] In some embodiments, the agent is a PD-L1 antagonist or inhibitor. As noted above, PD-L1 is one of the natural ligands for the PD-1 receptor. General examples of PD-L1 antagonists or inhibitors include an antibody or antigen-binding fragment or small molecule that specifically binds to PD-L1 and reduces one or more of its immune-suppressive activities, for example, its binding to the PD-1 receptor. Specific examples of PD-L1 antagonists include the antibodies atezolizumab (MPDL3280A), avelumab (MSB0010718C), and durvalumab (MEDI4736), and antigen-binding fragments thereof (see, e.g., U.S. Pat. Nos. 9,102,725; 9,393,301; 9,402,899; 9,439,962).

[0670] In some embodiments, the agent is a PD-L2 antagonist or inhibitor. As noted above, PD-L2 is one of the natural ligands for the PD-1 receptor. General examples of PD-L2 antagonists or inhibitors include an antibody or antigen-binding fragment or small molecule that specifically binds to PD-L2 and reduces one or more of its immune-suppressive activities, for example, its binding to the PD-1 receptor.

[0671] In some embodiments, the agent is a CTLA-4 antagonist or inhibitor. CTLA4 or CTLA-4 (cytotoxic T-lymphocyte-associated protein 4), also known as CD152 (cluster of differentiation 152), is a protein receptor that functions as an inhibitory immune checkpoint molecule, for example, by transmitting inhibitory signals to T-cells when it is bound to CD80 or CD86 on the surface of antigen-presenting cells. General examples CTLA-4 antagonists or inhibitors include an antibody or antigen-binding fragment or small molecule that specifically binds to CTLA-4. Particular examples include the antibodies ipilimumab and tremelimumab, and antigen-binding fragments thereof. At least some of the activity of ipilimumab is believed to be mediated by antibody-dependent cell-mediated cytotoxicity (ADCC) killing of suppressor Tregs that express CTLA-4.

[0672] In some embodiments, the agent is an IDO antagonist or inhibitor, or a TDO antagonist or inhibitor. IDO and TDO are tryptophan catabolic enzymes with immune-inhibitory properties. For example, IDO is known to suppress T-cells and NK cells, generate and activate Tregs and myeloid-derived suppressor cells, and promote tumor angiogenesis. General examples of IDO and TDO antagonists or inhibitors include an antibody or antigen-binding fragment or small molecule that specifically binds to IDO or TDO (see, e.g., Platten et al., Front Immunol. 5: 673, 2014) and reduces or inhibits one or more immune-suppressive activities. Specific examples of IDO antagonists or inhibitors include indoximod (NLG-8189), 1-methyl-tryptophan (1MT), β-Carboline (norharmane; 9H-pyrido[3,4-b]indole), rosmarinic acid, and epacadostat (see, e.g., Sheridan, Nature Biotechnology. 33:321-322, 2015). Specific examples of TDO antagonists or inhibitors include 680C91 and LM10 (see, e.g., Pilotte et al., PNAS USA. 109:2497-2502, 2012).

[0673] In some embodiments, the agent is a TIM-3 antagonist or inhibitor. T-cell Immunoglobulin domain and Mucin domain 3 (TIM-3) is expressed on activated human CD4+ T-cells and regulates Th1 and Th17 cytokines. TIM-3 also acts as a negative regulator of Th1/Tc1 function by triggering cell death upon interaction with its ligand, galectin-9. TIM-3 contributes to the suppressive tumor microenvironment and its overexpression is associated with poor prognosis in a variety of cancers (see, e.g., Li et al., Acta Oncol. 54:1706-13, 2015). General examples of TIM-3 antagonists or inhibitors include an antibody or antigen-binding fragment or small molecule that specifically binds to TIM-3 and reduces or inhibits one or more of its immune-suppressive activities.

[0674] In some embodiments, the agent is a LAG-3 antagonist or inhibitor. Lymphocyte Activation Gene-3 (LAG-3) is expressed on activated T-cells, natural killer cells, B-cells and plasmacytoid dendritic cells. It negatively regulates cellular proliferation, activation, and homeostasis of T-cells, in a similar fashion to CTLA-4 and PD-1 (see, e.g., Workman and Vignali. European Journal of Immun. 33: 970-9, 2003; and Workman et al., Journal of Immun. 172: 5450-5, 2004), and has been reported to play a role in Treg suppressive function (see, e.g., Huang et al., Immunity. 21: 503-13, 2004). LAG3 also maintains CD8+ T-cells in a tolerogenic state and combines with PD-1 to maintain CD8 T-cell exhaustion. General examples of LAG-3 antagonists or inhibitors include an antibody or antigen-binding fragment or small molecule that specifically binds to LAG-3 and inhibits one or more of its immune-suppressive activities. Specific examples include the antibody BMS-986016, and antigen-binding fragments thereof.

[0675] In some embodiments, the agent is a VISTA antagonist or inhibitor. V-domain Ig suppressor of T cell activation (VISTA) is primarily expressed on hematopoietic cells and is an inhibitory immune checkpoint regulator that suppresses T-cell activation, induces Foxp3 expression, and is highly expressed within the tumor microenvironment where it suppresses anti-tumor T cell responses (see, e.g., Lines et al., Cancer Res. 74:1924-32, 2014). General examples of VISTA antagonists or inhibitors include an antibody or antigen-binding fragment or small molecule that specifically binds to VISTA and reduces one or more of its immune-suppressive activities.

[0676] In some embodiments, the agent is a BTLA antagonist or inhibitor. B- and T-lymphocyte attenuator (BTLA; CD272) expression is induced during activation of T-cells, and it inhibits T-cells via interaction with tumor necrosis family receptors (TNF-R) and B7 family of cell surface receptors. BTLA is a ligand for tumor necrosis factor (receptor) superfamily, member 14 (TNFRSF14), also known as herpes virus entry mediator (HVEM). BTLA-HVEM complexes negatively regulate T-cell immune responses, for example, by inhibiting the function of human CD8+ cancer-specific T-cells (see, e.g., Derré et al., J Clin Invest 120:157-67, 2009). General examples of BTLA antagonists or inhibitors include an antibody or antigen-binding fragment or small molecule that specifically binds to BTLA-4 and reduce one or more of its immune-suppressive activities.

[0677] In some embodiments, the agent is an HVEM antagonist or inhibitor, for example, an antagonist or inhibitor that specifically binds to HVEM and interferes with its interaction with BTLA or CD160. General examples of HVEM antagonists or inhibitors include an antibody or antigen-binding fragment or small molecule that specifically binds to HVEM, optionally reduces the HVEM/BTLA and/or HVEM/CD160 interaction, and thereby reduces one or more of the immune-suppressive activities of HVEM.

[0678] In some embodiments, the agent is a CD160 antagonist or inhibitor, for example, an antagonist or inhibitor that specifically binds to CD160 and interferes with its interaction with HVEM. General examples of CD160 antagonists or inhibitors include an antibody or antigen-binding fragment or small molecule that specifically binds to CD160, optionally reduces the CD160/HVEM interaction, and thereby reduces or inhibits one or more of its immune-suppressive activities.

[0679] In some embodiments, the agent is a TIGIT antagonist or inhibitor. T cell Ig and ITIM domain (TIGIT) is a co-inhibitory receptor that is found on the surface of a variety of lymphoid cells, and suppresses antitumor immunity, for example, via Tregs (Kurtulus et al., J Clin Invest. 125:4053-4062, 2015). General examples of TIGIT antagonists or inhibitors include an antibody or antigen-binding fragment or small molecule that specifically binds to TIGIT and reduce one or more of its immune-suppressive activities (see, e.g., Johnston et al., Cancer Cell. 26:923-37, 2014).

[0680] In certain embodiments, the immune checkpoint modulatory agent is an agonist of one or more stimulatory immune checkpoint molecules. Exemplary stimulatory immune checkpoint molecules include OX40, CD40, Glucocorticoid-Induced TNFR Family Related Gene (GITR), CD137 (4-1BB), CD27, CD28, CD226, and Herpes Virus Entry Mediator (HVEM).

[0681] In some embodiments, the agent is an OX40 agonist. OX40 (CD134) promotes the expansion of effector and memory T cells, and suppresses the differentiation and activity of T-regulatory cells (see, e.g., Croft et al., Immunol Rev. 229:173-91, 2009). Its ligand is OX40L (CD252). Since OX40 signaling influences both T-cell activation and survival, it plays a key role in the initiation of an anti-tumor immune response in the lymph node and in the maintenance of the anti-tumor immune response in the tumor microenvironment. General examples of OX40 agonists include an antibody or antigen-binding fragment or small molecule or ligand that specifically binds to OX40 and increases one or more of its immunostimulatory activities. Specific examples include OX86, OX-40L, Fc-OX40L, GSK3174998, MEDI0562 (a humanized OX40 agonist), MEDI6469 (murine OX4 agonist), and MEDI6383 (an OX40 agonist), and antigen-binding fragments thereof.

[0682] In some embodiments, the agent is a CD40 agonist. CD40 is expressed on antigen-presenting cells (APC) and some malignancies. Its ligand is CD40L (CD154). On APC, ligation results in upregulation of costimulatory molecules, potentially bypassing the need for T-cell assistance in an antitumor immune response. CD40 agonist therapy plays an important role in APC maturation and their migration from the tumor to the lymph nodes, resulting in elevated antigen presentation and T cell activation. Anti-CD40 agonist antibodies produce substantial responses and durable anticancer immunity in animal models, an effect mediated at least in part by cytotoxic T-cells (see, e.g., Johnson et al. Clin Cancer Res. 21: 1321-1328, 2015; and Vonderheide and Glennie, Clin Cancer Res. 19:1035-43, 2013). General examples of CD40 agonists include an antibody or antigen-binding fragment or small molecule or ligand that specifically binds to CD40 and increases one or more of its immunostimulatory activities. Specific examples include CP-870,893, dacetuzumab, Chi Lob 7/4, ADC-1013, CD40L, rhCD40L, and antigen-binding fragments thereof.

[0683] In some embodiments, the agent is a GITR agonist. Glucocorticoid-Induced TNFR family Related gene (GITR) increases T cell expansion, inhibits the suppressive activity of Tregs, and extends the survival of T-effector cells. GITR agonists have been shown to promote an anti-tumor response through loss of Treg lineage stability (see, e.g., Schaer et al., Cancer Immunol Res. 1:320-31, 2013). These diverse mechanisms show that GITR plays an important role in initiating the immune response in the lymph nodes and in maintaining the immune response in the tumor tissue. Its ligand is GITRL. General examples of GITR agonists include an antibody or antigen-binding fragment or small molecule or ligand that specifically binds to GITR and increases one or more of its immunostimulatory activities. Specific examples include GITRL, INCAGN01876, DTA-1, MEDI1873, and antigen-binding fragments thereof.

[0684] In some embodiments, the agent is a CD137 agonist. CD137 (4-1BB) is a member of the tumor necrosis factor (TNF) receptor family, and crosslinking of CD137 enhances T-cell proliferation, IL-2 secretion, survival, and cytolytic activity. CD137-mediated signaling also protects T-cells such as CD8+ T-cells from activation-induced cell death. General examples of CD137 agonists include an antibody or antigen-binding fragment or small molecule or ligand that specifically binds to CD137 and increases one or more of its immunostimulatory activities. Specific examples include the CD137 (or 4-1BB) ligand (see, e.g., Shao and Schwarz, J Leukoc Biol. 89:21-9, 2011) and the antibody utomilumab, including antigen-binding fragments thereof.

[0685] In some embodiments, the agent is a CD27 agonist. Stimulation of CD27 increases antigen-specific expansion of naïve T cells and contributes to T-cell memory and long-term maintenance of T-cell immunity. Its ligand is CD70. The targeting of human CD27 with an agonist antibody stimulates T-cell activation and antitumor immunity (see, e.g., Thomas et al., Oncoimmunology. 2014; 3:e27255. doi:10.4161/onci.27255; and He et al., J Immunol. 191:4174-83, 2013). General examples of CD27 agonists include an antibody or antigen-binding fragment or small molecule or ligand that specifically binds to CD27 and increases one or more of its immunostimulatory activities. Specific examples include CD70 and the antibodies varlilumab and CDX-1127 (1F5), including antigen-binding fragments thereof.

[0686] In some embodiments, the agent is a CD28 agonist. CD28 is constitutively expressed CD4+ T cells some CD8+ T cells. Its ligands include CD80 and CD86, and its stimulation increases T-cell expansion. General examples of CD28 agonists include an antibody or antigen-binding fragment or small molecule or ligand that specifically binds to CD28 and increases one or more of its immunostimulatory activities. Specific examples include CD80, CD86, the antibody TAB08, and antigen-binding fragments thereof.

[0687] In some embodiments, the agent is CD226 agonist. CD226 is a stimulating receptor that shares ligands with TIGIT, and opposite to TIGIT, engagement of CD226 enhances T-cell activation (see, e.g., Kurtulus et al., J Clin Invest. 125:4053-4062, 2015; Bottino et al., J Exp Med. 1984:557-567, 2003; and Tahara-Hanaoka et al., Int Immunol. 16:533-538, 2004). General examples of CD226 agonists include an antibody or antigen-binding fragment or small molecule or ligand (e.g., CD112, CD155) that specifically binds to CD226 and increases one or more of its immunostimulatory activities.

[0688] In some embodiments, the agent is an HVEM agonist. Herpesvirus entry mediator (HVEM), also known as tumor necrosis factor receptor superfamily member 14 (TNFRSF14), is a human cell surface receptor of the TNF-receptor superfamily. HVEM is found on a variety of cells including T-cells, APCs, and other immune cells. Unlike other receptors, HVEM is expressed at high levels on resting T-cells and down-regulated upon activation. It has been shown that HVEM signaling plays a crucial role in the early phases of T-cell activation and during the expansion of tumor-specific lymphocyte populations in the lymph nodes. General examples of HVEM agonists include an antibody or antigen-binding fragment or small molecule or ligand that specifically binds to HVEM and increases one or more of its immunostimulatory activities.

[0689] The various cancer immunotherapy agents described herein can be combined with any one or more of the antibodies, and antigen-binding fragments thereof, described herein, and used according to any one or more of the methods or compositions described herein.

[0690] Certain combination therapies employ one or more chemotherapeutic agents, for example, small molecule chemotherapeutic agents. Non-limiting examples of chemotherapeutic agents include alkylating agents, anti-metabolites, cytotoxic antibiotics, topoisomerase inhibitors (type 1 or type II), an anti-microtubule agents, among others.

[0691] Examples of alkylating agents include nitrogen mustards (e.g., mechlorethamine, cyclophosphamide, mustine, melphalan, chlorambucil, ifosfamide, and busulfan), nitrosoureas (e.g., N-Nitroso-N-methylurea (MNU), carmustine (BCNU), lomustine (CCNU), semustine (MeCCNU), fotemustine, and streptozotocin), tetrazines (e.g., dacarbazine, mitozolomide, and temozolomide), aziridines (e.g., thiotepa, mytomycin, and diaziquone (AZQ)), cisplatins and derivatives thereof (e.g., carboplatin and oxaliplatin), and non-classical alkylating agents (optionally procarbazine and hexamethylmelamine).

[0692] Examples of anti-metabolites include anti-folates (e.g., methotrexate and pemetrexed), fluoropyrimidines (e.g., 5-fluorouracil and capecitabine), deoxynucleoside analogues (e.g., ancitabine, enocitabine, cytarabine, gemcitabine, decitabine, azacitidine, fludarabine, nelarabine, cladribine, clofarabine, fludarabine, and pentostatin), and thiopurines (e.g., thioguanine and mercaptopurine);

[0693] Examples of cytotoxic antibiotics include anthracyclines (e.g., doxorubicin, daunorubicin, epirubicin, idarubicin, pirarubicin, aclarubicin, and mitoxantrone), bleomycins, mitomycin C, mitoxantrone, and actinomycin. Examples of topoisomerase inhibitors include camptothecin, irinotecan, topotecan, etoposide, doxorubicin, mitoxantrone, teniposide, novobiocin, merbarone, and aclarubicin.

[0694] Examples of anti-microtubule agents include taxanes (e.g., paclitaxel and docetaxel) and vinca alkaloids (e.g., vinblastine, vincristine, vindesine, vinorelbine).

[0695] The various chemotherapeutic agents described herein can be combined with any one or more of the fusion proteins or anti-denatured collagen antibodies described herein, and used according to any one or more of the methods or compositions described herein.

[0696] Certain combination therapies employ at least one hormonal therapeutic agent. General examples of hormonal therapeutic agents include hormonal agonists and hormonal antagonists.

[0697] Particular examples of hormonal agonists include progestogen (progestin), corticosteroids (e.g., prednisolone, methylprednisolone, dexamethasone), insulin like growth factors, VEGF derived angiogenic and lymphangiogenic factors (e.g., VEGF-A, VEGF-A145, VEGF-A165, VEGF-C, VEGF-D, PIGF-2), fibroblast growth factor (FGF), galectin, hepatocyte growth factor (HGF), platelet derived growth factor (PDGF), transforming growth factor (TGF)-beta, androgens, estrogens, and somatostatin analogs. Examples of hormonal antagonists include hormone synthesis inhibitors such as aromatase inhibitors and gonadotropin-releasing hormone (GnRH)s agonists (e.g., leuprolide, goserelin, triptorelin, histrelin) including analogs thereof. Also included are hormone receptor antagonist such as selective estrogen receptor modulators (SERMs; e.g., tamoxifen, raloxifene, toremifene) and anti-androgens (e.g., flutamide, bicalutamide, nilutamide).

[0698] Also included are hormonal pathway inhibitors such as antibodies directed against hormonal receptors. Examples include inhibitors of the IGF receptor (e.g., IGF-IR1) such as cixutumumab, dalotuzumab, figitumumab, ganitumab, istiratumab, and robatumumab; inhibitors of the vascular endothelial growth factor receptors 1, 2 or 3 (VEGFR1, VEGFR2 or VEGFR3) such as alacizumab pegol, bevacizumab, icrucumab, ramucirumab; inhibitors of the TGF-beta receptors R1, R2, and R3 such as fresolimumab and metelimumab; inhibitors of c-Met such as naxitamab; inhibitors of the EGF receptor such as cetuximab, depatuxizumab mafodotin, futuximab, imgatuzumab, laprituximab emtansine, matuzumab, modotuximab, necitumumab, nimotuzumab, panitumumab, tomuzotuximab, and zalutumumab; inhibitors of the FGF receptor such as aprutumab ixadotin and bemarituzumab; and inhibitors of the PDGF receptor such as olaratumab and tovetumab.

[0699] The various hormonal therapeutic agents described herein can be combined with any one or more of the various fusion proteins or improved anti-denatured collagen antibodies described herein, and used according to any one or more of the methods or compositions described herein.

[0700] Certain combination therapies employ at least one kinase inhibitor, including tyrosine kinase inhibitors. Examples of kinase inhibitors include, without limitation, adavosertib, afanitib, aflibercept, axitinib, bevacizumab, bosutinib, cabozantinib, cetuximab, cobimetinib, crizotinib, dasatinib, entrectinib, erdafitinib, erlotinib, fostamitinib, gefitinib, ibrutinib, imatinib, lapatinib, lenvatinib, mubritinib, nilotinib, panitumumab, pazopanib, pegaptanib, ponatinib, ranibizumab, regorafenib, ruxolitinib, sorafenib, sunitinib, SU6656, tofacitinib, trastuzumab, vandetanib, and vemuafenib.

[0701] The various kinase inhibitors described herein can be combined with any one or more of the various fusion proteins or improved anti-denatured collagen antibodies described herein, and used according to any one or more of the methods or compositions described herein.

[0702] In some embodiments, the methods and pharmaceutical compositions described herein increase median survival time of a subject by 4 weeks, 5 weeks, 6 weeks, 7 weeks, 8 weeks, 9 weeks, 10 weeks, 15 weeks, 20 weeks, 25 weeks, 30 weeks, 40 weeks, or longer. In certain embodiments, the methods and pharmaceutical compositions described herein increase median survival time of a subject by 1 year, 2 years, 3 years, or longer. In some embodiments, the methods and pharmaceutical compositions increase progression-free survival by 2 weeks, 3 weeks, 4 weeks, 5 weeks, 6 weeks, 7 weeks, 8 weeks, 9 weeks, 10 weeks or longer. In certain embodiments, the methods and pharmaceutical compositions described herein increase progression-free survival by 1 year, 2 years, 3 years, or longer.

[0703] In certain embodiments, the methods and therapeutic compositions described herein are sufficient to result in tumor regression, as indicated by a statistically significant decrease in the amount of viable tumor, for example, at least a 10%, 20%, 30%, 40%, 50% or greater decrease in tumor mass, or by altered (e.g., decreased with statistical significance) scan dimensions. In certain embodiments, the methods and therapeutic compositions described herein are sufficient to result in stable disease.

[0704] In some embodiments, the disease is a viral disease or viral infection. In certain embodiments, the viral infection is selected from one or more of human immunodeficiency virus (HIV), Hepatitis A, Hepatitis B, Hepatitis C, Hepatitis E, Caliciviruses associated diarrhoea, Rotavirus diarrhoea, Haemophilus influenzae B pneumonia and invasive disease, influenza, measles, mumps, rubella, Parainfluenza associated pneumonia, Respiratory syncytial virus (RSV) pneumonia, Severe Acute Respiratory Syndrome (SARS), Human papillomavirus, Herpes simplex type 2 genital ulcers, Dengue Fever, Japanese encephalitis, Tick-borne encephalitis, West-Nile virus associated disease, Yellow Fever, Epstein-Barr virus, Lassa fever, Crimean-Congo haemorrhagic fever, Ebola haemorrhagic fever, Marburg haemorrhagic fever, Rabies, Rift Valley fever, Smallpox, upper and lower respiratory infections, and poliomyelitis. In specific embodiments, the subject is HIV-positive. In some embodiments, the methods and pharmaceutical compositions described herein increase an anti-viral immune response by about or at least about 5, 10, 15, 20, 25, 30, 35, 40, 45, 50, 60, 70, 80, 90, 100, 200, 300, 400, 500, 600, 700, 800, 900, 1000, 2000% or more, relative to a control.

[0705] In some embodiments, the immune disorder is selected from one or more of type 1 diabetes, vasculitis, and an immunodeficiency. In some embodiments, the methods and pharmaceutical compositions described herein improve or increase immune function in the subject, for example, by about or at least about 5, 10, 15, 20, 25, 30, 35, 40, 45, 50, 60, 70, 80, 90, 100, 200, 300, 400, 500, 600, 700, 800, 900, 1000, 2000% or more, relative to a control.

[0706] In some embodiments, the immune disorder is an autoimmune and/or inflammatory disease. In some embodiments, the methods and pharmaceutical compositions described herein decrease pathological or disease-associated immune function in the subject, for example, by about or at least about 5, 10, 15, 20, 25, 30, 35, 40, 45, 50, 60, 70, 80, 90, 100, 200, 300, 400, 500, 600, 700, 800, 900, 1000, 2000% or more, relative to a control. Exemplary autoimmune diseases include, but are not limited to, arthritis (including rheumatoid arthritis, reactive arthritis), systemic lupus erythematosus (SLE), psoriasis and inflammatory bowel disease (IBD), encephalomyelitis, uveitis, myasthenia gravis, multiple sclerosis, insulin dependent diabetes, Addison's disease, celiac disease, chronic fatigue syndrome, autoimmune hepatitis, autoimmune alopecia, ankylosing spondylitis, ulcerative colitis, Crohn's disease, fibromyalgia, pemphigus vulgaris, Sjogren's syndrome, Kawasaki's Disease, hyperthyroidism/Graves' disease, hypothyroidism/Hashimoto's disease, endometriosis, scleroderma, pernicious anemia, Goodpasture syndrome, Guillain-Barré syndrome, Wegener's disease, glomerulonephritis, aplastic anemia (including multiply transfused aplastic anemia patients), paroxysmal nocturnal hemoglobinuria, myelodysplastic syndrome, idiopathic thrombocytopenic purpura, autoimmune hemolytic anemia, Evan's syndrome, Factor VIII inhibitor syndrome, systemic vasculitis, dermatomyositis, polymyositis and rheumatic fever, autoimmune lymphoproliferative syndrome (ALPS), autoimmune bullous pemphigoid, Parkinson's disease, sarcoidosis, vitiligo, primary biliary cirrhosis, and autoimmune myocarditis.

[0707] Exemplary inflammatory diseases include, but are not limited to, Crohn's disease, colitis, dermatitis, psoriasis, diverticulitis, hepatitis, irritable bowel syndrome (IBS), lupus erythematous, nephritis, Parkinson's disease, ulcerative colitis, multiple sclerosis (MS), Alzheimer's disease, arthritis, rheumatoid arthritis, asthma, and various cardiovascular diseases such as atherosclerosis and vasculitis. In certain embodiments, the inflammatory disease is selected from the group consisting of rheumatoid arthritis, diabetes, gout, cryopyrin-associated periodic syndrome, and chronic obstructive pulmonary disorder.

[0708] In specific embodiments, and further to above, the effector domain comprises an IL-10 polypeptide and the disease is selected from one or more of cancer, autoimmune or inflammatory diseases, for example, of the gastrointestinal tract (for example, Crohn's disease), rheumatoid arthritis, multiple sclerosis, and others. In specific embodiments, and further to above, the effector domain comprises an IFNα polypeptide and the disease is selected from one or more of hairy cell leukemia, malignant melanoma, follicular lymphoma, Kaposi's sarcoma related to AIDS, genital warts, hepatitis B, or hepatitis C.

[0709] In certain embodiments, the methods and therapeutic compositions described herein are sufficient to result in clinically relevant reduction in symptoms of a particular disease indication known to the skilled clinician.

[0710] For in vivo use, as noted above, for the treatment of human or non-human mammalian disease or testing, the protein agents described herein (e.g., fusion proteins, improved anti-denatured collagen antibodies, or antigen-binding fragments thereof) are incorporated into one or more therapeutic or pharmaceutical or diagnostic compositions prior to administration.

[0711] Thus, certain embodiments relate to pharmaceutical or therapeutic compositions that comprise at least one fusion protein, or at least one anti-denatured collagen antibody (or antigen-binding fragment thereof), as described herein. In some instances, a pharmaceutical or therapeutic composition comprises one or more of the protein agents described herein in combination with a pharmaceutically- or physiologically-acceptable carrier or excipient. Certain pharmaceutical or therapeutic compositions further comprise at least one additional agent, for example, a cancer immunotherapy agents, a chemotherapeutic agent, a hormonal therapeutic agent, and/or a kinase inhibitor as described herein.

[0712] Some therapeutic compositions comprise (and certain methods utilize) only one fusion protein, or only one improved anti-denatured collagen antibody (or antigen-binding fragment thereof).

[0713] Certain therapeutic compositions comprise (and certain methods utilize) a mixture of at least two, three, four, or five different fusion proteins, or improved anti-denatured collagen antibodies (or antigen-binding fragments thereof).

[0714] In particular embodiments, the pharmaceutical or therapeutic compositions comprising at least one fusion protein, or at least one improved anti-denatured collagen antibody (or antigen-binding fragment thereof), is substantially pure on a protein basis or a weight-weight basis, for example, the composition has a purity of at least about 80%, 85%, 90%, 95%, 98%, or 99% on a protein basis or a weight-weight basis.

[0715] In some embodiments, the protein agents described herein do not form aggregates, have a desired solubility, and/or have an immunogenicity profile that is suitable for use in humans, as known in the art. Thus, in some embodiments, the therapeutic composition comprising a protein agent is substantially aggregate-free. For example, certain compositions comprise less than about 10% (on a protein basis) high molecular weight aggregated proteins, or less than about 5% high molecular weight aggregated proteins, or less than about 4% high molecular weight aggregated proteins, or less than about 3% high molecular weight aggregated proteins, or less than about 2% high molecular weight aggregated proteins, or less than about 1% high molecular weight aggregated proteins. Some compositions comprise a protein agent that is at least about 50%, about 60%, about 70%, about 80%, about 90% or about 95% monodisperse with respect to its apparent molecular mass.

[0716] In some embodiments, a protein agent is concentrated to about or at least about 0.1 mg/ml, 0.2 mg/ml, 0.3 mg/ml, 0.4 mg/ml, 0.5 mg/ml, 0.6, 0.7, 0.8, 0.9, 1 mg/ml, 2 mg/ml, 3 mg/ml, 4 mg/ml, 5 mg/ml, 6 mg/ml, 7 mg/ml, 8 mg/ml, 9 mg/ml, 10 mg/ml, 11, 12, 13, 14 or 15 mg/ml and are formulated for biotherapeutic uses.

[0717] To prepare a therapeutic or pharmaceutical composition, an effective or desired amount of one or more agents is mixed with any pharmaceutical carrier(s) or excipient known to those skilled in the art to be suitable for the particular agent and/or mode of administration. A pharmaceutical carrier may be liquid, semi-liquid or solid. Solutions or suspensions used for parenteral, intradermal, subcutaneous or topical application may include, for example, a sterile diluent (such as water), saline solution (e.g., phosphate buffered saline; PBS), fixed oil, polyethylene glycol, glycerin, propylene glycol or other synthetic solvent; antimicrobial agents (such as benzyl alcohol and methyl parabens); antioxidants (such as ascorbic acid and sodium bisulfite) and chelating agents (such as ethylenediaminetetraacetic acid (EDTA)); buffers (such as acetates, citrates and phosphates). If administered intravenously (e.g., by IV infusion), suitable carriers include physiological saline or phosphate buffered saline (PBS), and solutions containing thickening and solubilizing agents, such as glucose, polyethylene glycol, polypropylene glycol and mixtures thereof.

[0718] Administration of agents described herein, in pure form or in an appropriate therapeutic or pharmaceutical composition, can be carried out via any of the accepted modes of administration of agents for serving similar utilities. The therapeutic or pharmaceutical compositions can be prepared by combining an agent-containing composition with an appropriate physiologically acceptable carrier, diluent or excipient, and may be formulated into preparations in solid, semi-solid, liquid or gaseous forms, such as tablets, capsules, powders, granules, ointments, solutions, suppositories, injections, inhalants, gels, microspheres, and aerosols. In addition, other pharmaceutically active ingredients (including other small molecules as described elsewhere herein) and/or suitable excipients such as salts, buffers and stabilizers may, but need not, be present within the composition.

[0719] Administration may be achieved by a variety of different routes, including oral, parenteral, nasal, intravenous, intradermal, intramuscular, subcutaneous or topical. Preferred modes of administration depend upon the nature of the condition to be treated or prevented. Particular embodiments include administration by IV infusion.

[0720] Carriers can include, for example, pharmaceutically- or physiologically-acceptable carriers, excipients, or stabilizers that are non-toxic to the cell or mammal being exposed thereto at the dosages and concentrations employed. Often the physiologically-acceptable carrier is an aqueous pH buffered solution. Examples of physiologically acceptable carriers include buffers such as phosphate, citrate, and other organic acids; antioxidants including ascorbic acid; low molecular weight (less than about 10 residues) polypeptide; proteins, such as serum albumin, gelatin, or immunoglobulins; hydrophilic polymers such as polyvinylpyrrolidone; amino acids such as glycine, glutamine, asparagine, arginine or lysine; monosaccharides, disaccharides, and other carbohydrates including glucose, mannose, or dextrins; chelating agents such as EDTA; sugar alcohols such as mannitol or sorbitol; salt-forming counterions such as sodium; and/or nonionic surfactants such as polysorbate 20 (TWEEN™) polyethylene glycol (PEG), and poloxamers (PLURONICS™), and the like.

[0721] In some embodiments, one or more agents can be entrapped in microcapsules prepared, for example, by coacervation techniques or by interfacial polymerization (for example, hydroxymethylcellulose or gelatin-microcapsules and poly-(methylmethacylate)microcapsules, respectively), in colloidal drug delivery systems (for example, liposomes, albumin microspheres, microemulsions, nano-particles and nanocapsules), or in macroemulsions. Such techniques are disclosed in Remington's Pharmaceutical Sciences, 16th edition, Oslo, A., Ed., (1980). The particle(s) or liposomes may further comprise other therapeutic or diagnostic agents.

[0722] The precise dosage and duration of treatment is a function of the disease being treated and may be determined empirically using known testing protocols or by testing the compositions in model systems known in the art and extrapolating therefrom. Controlled clinical trials may also be performed. Dosages may also vary with the severity of the condition to be alleviated. A pharmaceutical composition is generally formulated and administered to exert a therapeutically useful effect while minimizing undesirable side effects. The composition may be administered one time, or may be divided into a number of smaller doses to be administered at intervals of time. For any particular subject, specific dosage regimens may be adjusted over time according to the individual need.

[0723] Typical routes of administering these and related therapeutic or pharmaceutical compositions thus include, without limitation, oral, topical, transdermal, inhalation, parenteral, sublingual, buccal, rectal, vaginal, and intranasal. The term parenteral as used herein includes subcutaneous injections, intravenous, intramuscular, intrasternal injection or infusion techniques. Therapeutic or pharmaceutical compositions according to certain embodiments of the present disclosure are formulated so as to allow the active ingredients contained therein to be bioavailable upon administration of the composition to a subject or patient. Compositions that will be administered to a subject or patient may take the form of one or more dosage units, where for example, a tablet may be a single dosage unit, and a container of a herein described agent in aerosol form may hold a plurality of dosage units. Actual methods of preparing such dosage forms are known, or will be apparent, to those skilled in this art; for example, see Remington: The Science and Practice of Pharmacy, 20th Edition (Philadelphia College of Pharmacy and Science, 2000). The composition to be administered will typically contain a therapeutically effective amount of an agent described herein, for treatment of a disease or condition of interest.

[0724] A therapeutic or pharmaceutical composition may be in the form of a solid or liquid. In one embodiment, the carrier(s) are particulate, so that the compositions are, for example, in tablet or powder form. The carrier(s) may be liquid, with the compositions being, for example, an oral oil, injectable liquid or an aerosol, which is useful in, for example, inhalatory administration. When intended for oral administration, the pharmaceutical composition is preferably in either solid or liquid form, where semi-solid, semi-liquid, suspension and gel forms are included within the forms considered herein as either solid or liquid. Certain embodiments include sterile, injectable solutions.

[0725] As a solid composition for oral administration, the pharmaceutical composition may be formulated into a powder, granule, compressed tablet, pill, capsule, chewing gum, wafer or the like. Such a solid composition will typically contain one or more inert diluents or edible carriers. In addition, one or more of the following may be present: binders such as carboxymethylcellulose, ethyl cellulose, microcrystalline cellulose, gum tragacanth or gelatin; excipients such as starch, lactose or dextrins, disintegrating agents such as alginic acid, sodium alginate, Primogel, corn starch and the like; lubricants such as magnesium stearate or Sterotex; glidants such as colloidal silicon dioxide; sweetening agents such as sucrose or saccharin; a flavoring agent such as peppermint, methyl salicylate or orange flavoring; and a coloring agent. When the pharmaceutical composition is in the form of a capsule, for example, a gelatin capsule, it may contain, in addition to materials of the above type, a liquid carrier such as polyethylene glycol or oil.

[0726] The therapeutic or pharmaceutical composition may be in the form of a liquid, for example, an elixir, syrup, solution, emulsion or suspension. The liquid may be for oral administration or for delivery by injection, as two examples. When intended for oral administration, preferred composition contain, in addition to the present compounds, one or more of a sweetening agent, preservatives, dye/colorant and flavor enhancer. In a composition intended to be administered by injection, one or more of a surfactant, preservative, wetting agent, dispersing agent, suspending agent, buffer, stabilizer and isotonic agent may be included.

[0727] The liquid therapeutic or pharmaceutical compositions, whether they be solutions, suspensions or other like form, may include one or more of the following adjuvants: sterile diluents such as water for injection, saline solution, preferably physiological saline, Ringer's solution, isotonic sodium chloride, fixed oils such as synthetic mono or diglycerides which may serve as the solvent or suspending medium, polyethylene glycols, glycerin, propylene glycol or other solvents; antibacterial agents such as benzyl alcohol or methyl paraben; antioxidants such as ascorbic acid or sodium bisulfite; chelating agents such as ethylenediaminetetraacetic acid; buffers such as acetates, citrates or phosphates and agents for the adjustment of tonicity such as sodium chloride or dextrose. The parenteral preparation can be enclosed in ampoules, disposable syringes or multiple dose vials made of glass or plastic. Physiological saline is a preferred adjuvant. An injectable pharmaceutical composition is preferably sterile.

[0728] A liquid therapeutic or pharmaceutical composition intended for either parenteral or oral administration should contain an amount of an agent such that a suitable dosage will be obtained. Typically, this amount is at least 0.01% of the agent of interest in the composition. When intended for oral administration, this amount may be varied to be between 0.1 and about 70% of the weight of the composition. Certain oral therapeutic or pharmaceutical compositions contain between about 4% and about 75% of the agent of interest. In certain embodiments, therapeutic or pharmaceutical compositions and preparations are prepared so that a parenteral dosage unit contains between 0.01 to 10% by weight of the agent of interest prior to dilution.

[0729] The therapeutic or pharmaceutical compositions may be intended for topical administration, in which case the carrier may suitably comprise a solution, emulsion, ointment or gel base. The base, for example, may comprise one or more of the following: petrolatum, lanolin, polyethylene glycols, bee wax, mineral oil, diluents such as water and alcohol, and emulsifiers and stabilizers. Thickening agents may be present in a therapeutic or pharmaceutical composition for topical administration. If intended for transdermal administration, the composition may include a transdermal patch or iontophoresis device.

[0730] The therapeutic or pharmaceutical compositions may be intended for rectal administration, in the form, for example, of a suppository, which will melt in the rectum and release the drug. The composition for rectal administration may contain an oleaginous base as a suitable nonirritating excipient. Such bases include, without limitation, lanolin, cocoa butter, and polyethylene glycol.

[0731] The therapeutic or pharmaceutical composition may include various materials, which modify the physical form of a solid or liquid dosage unit. For example, the composition may include materials that form a coating shell around the active ingredients. The materials that form the coating shell are typically inert, and may be selected from, for example, sugar, shellac, and other enteric coating agents. Alternatively, the active ingredients may be encased in a gelatin capsule. The therapeutic or pharmaceutical compositions in solid or liquid form may include a component that binds to agent and thereby assists in the delivery of the compound. Suitable components that may act in this capacity include monoclonal or polyclonal antibodies, one or more proteins or a liposome.

[0732] The therapeutic or pharmaceutical composition may consist essentially of dosage units that can be administered as an aerosol. The term aerosol is used to denote a variety of systems ranging from those of colloidal nature to systems consisting of pressurized packages. Delivery may be by a liquefied or compressed gas or by a suitable pump system that dispenses the active ingredients.

[0733] Aerosols may be delivered in single phase, bi-phasic, or tri-phasic systems in order to deliver the active ingredient(s). Delivery of the aerosol includes the necessary container, activators, valves, subcontainers, and the like, which together may form a kit. One of ordinary skill in the art, without undue experimentation may determine preferred aerosols.

[0734] The compositions described herein may be prepared with carriers that protect the agents against rapid elimination from the body, such as time release formulations or coatings. Such carriers include controlled release formulations, such as, but not limited to, implants and microencapsulated delivery systems, and biodegradable, biocompatible polymers, such as ethylene vinyl acetate, polyanhydrides, polyglycolic acid, polyorthoesters, polylactic acid and others known to those of ordinary skill in the art.

[0735] The therapeutic or pharmaceutical compositions may be prepared by methodology well known in the pharmaceutical art. For example, a therapeutic or pharmaceutical composition intended to be administered by injection may comprise one or more of salts, buffers and/or stabilizers, with sterile, distilled water so as to form a solution. A surfactant may be added to facilitate the formation of a homogeneous solution or suspension. Surfactants are compounds that non-covalently interact with the agent so as to facilitate dissolution or homogeneous suspension of the agent in the aqueous delivery system.

[0736] The therapeutic or pharmaceutical compositions may be administered in a therapeutically effective amount, which will vary depending upon a variety of factors including the activity of the specific compound employed; the metabolic stability and length of action of the compound; the age, body weight, general health, sex, and diet of the subject; the mode and time of administration; the rate of excretion; the drug combination; the severity of the particular disorder or condition; and the subject undergoing therapy. In some instances, a therapeutically effective daily dose is (for a 70 kg mammal) from about 0.001 mg/kg (i.e., ˜0.07 mg) to about 100 mg/kg (i.e., ˜7.0 g); preferably a therapeutically effective dose is (for a 70 kg mammal) from about 0.01 mg/kg (i.e., ˜0.7 mg) to about 50 mg/kg (i.e., ˜3.5 g); more preferably a therapeutically effective dose is (for a 70 kg mammal) from about 1 mg/kg (i.e., ˜70 mg) to about 25 mg/kg (i.e., ˜1.75 g). In some embodiments, the therapeutically effective dose is administered on a weekly, bi-weekly, or monthly basis. In specific embodiments, the therapeutically effective dose is administered on a weekly, bi-weekly, or monthly basis, for example, at a dose of about 1-10 or 1-5 mg/kg, or about 1, 2, 3, 4, 5, 6, 7, 8, 9, or 10 mg/kg.

[0737] The combination therapies described herein may include administration of a single pharmaceutical dosage formulation, which contains a protein agent described herein (e.g., fusion protein, improved anti-denatured collagen antibody or antigen-binding fragment thereof) and an additional therapeutic agent (e.g., cancer immunotherapy agent, chemotherapeutic agent, hormonal therapeutic agent, kinase inhibitor), as well as administration of compositions comprising a protein agent and an additional therapeutic agent in its own separate pharmaceutical dosage formulation. For example, a protein agent described herein and additional therapeutic agent can be administered to the subject together in a single oral dosage composition such as a tablet or capsule, or each agent administered in separate oral dosage formulations. Similarly, a protein agent described herein and additional therapeutic agent can be administered to the subject together in a single parenteral dosage composition such as in a saline solution or other physiologically acceptable solution, or each agent administered in separate parenteral dosage formulations. As another example, for cell-based therapies, a protein agent described herein can be mixed with the cells prior to administration, administered as part of a separate composition, or both. Where separate dosage formulations are used, the compositions can be administered at essentially the same time, i.e., concurrently, or at separately staggered times, i.e., sequentially and in any order; combination therapy is understood to include all these regimens.

[0738] Also included are patient care kits, comprising (a) at least one protein agent described herein, as described herein; and optionally (b) at least one additional therapeutic agent (e.g., cancer immunotherapy agent, chemotherapeutic agent, hormonal therapeutic agent, kinase inhibitor). In certain kits, (a) and (b) are in separate therapeutic compositions. In some kits, (a) and (b) are in the same therapeutic composition.

[0739] The kits herein may also include a one or more additional therapeutic agents or other components suitable or desired for the indication being treated, or for the desired diagnostic application. The kits herein can also include one or more syringes or other components necessary or desired to facilitate an intended mode of delivery (e.g., stents, implantable depots, etc.).

[0740] In some embodiments, a patient care kit contains separate containers, dividers, or compartments for the composition(s) and informational material(s). For example, the composition(s) can be contained in a bottle, vial, or syringe, and the informational material(s) can be contained in association with the container. In some embodiments, the separate elements of the kit are contained within a single, undivided container. For example, the composition is contained in a bottle, vial or syringe that has attached thereto the informational material in the form of a label. In some embodiments, the kit includes a plurality (e.g., a pack) of individual containers, each containing one or more unit dosage forms (e.g., a dosage form described herein) of a protein agent described herein and optionally at least one additional therapeutic agent. For example, the kit includes a plurality of syringes, ampules, foil packets, or blister packs, each containing a single unit dose of a protein agent described herein and optionally at least one additional therapeutic agent. The containers of the kits can be air tight, waterproof (e.g., impermeable to changes in moisture or evaporation), and/or light-tight.

[0741] The patient care kit optionally includes a device suitable for administration of the composition, e.g., a syringe, inhalant, dropper (e.g., eye dropper), swab (e.g., a cotton swab or wooden swab), or any such delivery device. In some embodiments, the device is an implantable device that dispenses metered doses of the agent(s). Also included are methods of providing a kit, e.g., by combining the components described herein.

[0742] Expression and Purification Systems

[0743] Certain embodiments include methods and related compositions for expressing and purifying recombinant proteins, such as a fusion protein or an anti-denatured collagen antibody, or an antigen-binding fragment thereof, described herein. Such recombinant proteins can be conveniently prepared using standard protocols as described for example in Sambrook, et al., (1989, supra), in particular Sections 16 and 17; Ausubel et al., (1994, supra), in particular Chapters 10 and 16; and Coligan et al., Current Protocols in Protein Science (John Wiley & Sons, Inc. 1995-1997), in particular Chapters 1, 5 and 6. As one general example, recombinant proteins may be prepared by a procedure including one or more of the steps of: (a) preparing one or more vectors or constructs comprising one or more polynucleotide sequences that encode one or more proteins described herein, which are operably linked to one or more regulatory elements; (b) introducing the one or more vectors or constructs into one or more host cells; (c) culturing the one or more host cell to express the one or more proteins; and (d) isolating the one or more proteins from the host cell.

[0744] To express a desired polypeptide, a nucleotide sequence encoding a first and/or second polypeptide chain of a protein may be inserted into appropriate expression vector(s), i.e., vector(s) which contain the necessary elements for the transcription and translation of the inserted coding sequence. Methods which are well known to those skilled in the art may be used to construct expression vectors containing sequences encoding a polypeptide of interest and appropriate transcriptional and translational control elements. These methods include in vitro recombinant DNA techniques, synthetic techniques, and in vivo genetic recombination. Such techniques are described in Sambrook et al., Molecular Cloning, A Laboratory Manual (1989), and Ausubel et al., Current Protocols in Molecular Biology (1989).

[0745] A variety of expression vector/host systems are known and may be utilized to contain and express polynucleotide sequences. These include, but are not limited to, microorganisms such as bacteria transformed with recombinant bacteriophage, plasmid, or cosmid DNA expression vectors; yeast transformed with yeast expression vectors; insect cell systems infected with virus expression vectors (e.g., baculovirus); plant cell systems transformed with virus expression vectors (e.g., cauliflower mosaic virus, CaMV; tobacco mosaic virus, TMV) or with bacterial expression vectors (e.g., Ti or pBR322 plasmids); or animal cell systems, including mammalian cell and more specifically human cell systems.

[0746] The “control elements” or “regulatory sequences” present in an expression vector are those non-translated regions of the vector—enhancers, promoters, 5′ and 3′ untranslated regions—which interact with host cellular proteins to carry out transcription and translation. Such elements may vary in their strength and specificity. Depending on the vector system and host utilized, any number of suitable transcription and translation elements, including constitutive and inducible promoters, may be used. For example, when cloning in bacterial systems, inducible promoters such as the hybrid lacZ promoter of the PBLUESCRIPT phagemid (Stratagene, La Jolla, Calif.) or PSPORT1 plasmid (Gibco BRL, Gaithersburg, Md.) and the like may be used. In mammalian cell systems, promoters from mammalian genes or from mammalian viruses are generally preferred. If it is necessary to generate a cell line that contains multiple copies of the sequence encoding a polypeptide, vectors based on SV40 or EBV may be advantageously used with an appropriate selectable marker.

[0747] In bacterial systems, a number of expression vectors may be selected depending upon the use intended for the expressed polypeptide. For example, when large quantities are needed, vectors may be used which direct high level expression of fusion proteins or improved anti-denatured collagen antibodies that are readily purified. Such vectors include but are not limited to, the multifunctional E. coli cloning and expression vectors such as BLUESCRIPT (Stratagene), in which the sequence encoding the polypeptide of interest may be ligated into the vector in frame with sequences for the amino-terminal Met and the subsequent 7 residues of β-galactosidase so that a hybrid protein is produced; pIN vectors (Van Heeke & Schuster, J. Biol. Chem. 264:5503 5509 (1989)); and the like. pGEX Vectors (Promega, Madison, Wis.) may also be used to express foreign polypeptides as fusion proteins with glutathione S-transferase (GST). In general, such fusion proteins are soluble and can easily be purified from lysed cells by adsorption to glutathione-agarose beads followed by elution in the presence of free glutathione. Proteins made in such systems may be designed to include heparin, thrombin, or factor XA protease cleavage sites so that the cloned polypeptide of interest can be released from the GST moiety at will.

[0748] Certain embodiments employ E. coli-based expression systems (see, e.g., Structural Genomics Consortium et al., Nature Methods. 5:135-146, 2008). These and related embodiments may rely partially or totally on ligation-independent cloning (LIC) to produce a suitable expression vector. In specific embodiments, protein expression may be controlled by a T7 RNA polymerase (e.g., pET vector series). These and related embodiments may utilize the expression host strain BL21(DE3), a λDE3 lysogen of BL21 that supports T7-mediated expression and is deficient in lon and ompT proteases for improved target protein stability. Also included are expression host strains carrying plasmids encoding tRNAs rarely used in E. coli, such as ROSETTA™ (DE3) and Rosetta 2 (DE3) strains. Cell lysis and sample handling may also be improved using reagents sold under the trademarks BENZONASE® nuclease and BUGBUSTER® Protein Extraction Reagent. For cell culture, auto-inducing media can improve the efficiency of many expression systems, including high-throughput expression systems. Media of this type (e.g., OVERNIGHT EXPRESS™ Autoinduction System) gradually elicit protein expression through metabolic shift without the addition of artificial inducing agents such as IPTG. Particular embodiments employ hexahistidine tags (such as those sold under the trademark HIS•TAG® fusions), followed by immobilized metal affinity chromatography (IMAC) purification, or related techniques. In certain aspects, however, clinical grade proteins can be isolated from E. coli inclusion bodies, without or without the use of affinity tags (see, e.g., Shimp et al., Protein Expr Purif. 50:58-67, 2006). As a further example, certain embodiments may employ a cold-shock induced E. coli high-yield production system, because over-expression of proteins in Escherichia coli at low temperature improves their solubility and stability (see, e.g., Qing et al., Nature Biotechnology. 22:877-882, 2004).

[0749] Also included are high-density bacterial fermentation systems. For example, high cell density cultivation of Ralstonia eutropha allows protein production at cell densities of over 150 g/L, and the expression of recombinant proteins at titers exceeding 10 g/L.

[0750] In the yeast Saccharomyces cerevisiae, a number of vectors containing constitutive or inducible promoters such as alpha factor, alcohol oxidase, and PGH may be used. For reviews, see Ausubel et al. (supra) and Grant et al., Methods Enzymol. 153:516-544 (1987). Also included are Pichia pandoris expression systems (see, e.g., Li et al., Nature Biotechnology. 24, 210-215, 2006; and Hamilton et al., Science, 301:1244, 2003). Certain embodiments include yeast systems that are engineered to selectively glycosylate proteins, including yeast that have humanized N-glycosylation pathways, among others (see, e.g., Hamilton et al., Science. 313:1441-1443, 2006; Wildt et al., Nature Reviews Microbiol. 3:119-28, 2005; and Gerngross et al., Nature-Biotechnology. 22:1409-1414, 2004; U.S. Pat. Nos. 7,629,163; 7,326,681; and 7,029,872). Merely by way of example, recombinant yeast cultures can be grown in Fernbach Flasks or 15L, 50L, 100L, and 200L fermentors, among others.

[0751] In cases where plant expression vectors are used, the expression of sequences encoding polypeptides may be driven by any of a number of promoters. For example, viral promoters such as the 35S and 19S promoters of CaMV may be used alone or in combination with the omega leader sequence from TMV (Takamatsu, EMBO J. 6:307-311 (1987)). Alternatively, plant promoters such as the small subunit of RUBISCO or heat shock promoters may be used (Coruzzi et al., EMBO J. 3:1671-1680 (1984); Broglie et al., Science 224:838-843 (1984); and Winter et al., Results Probl. Cell Differ. 17:85-105 (1991)). These constructs can be introduced into plant cells by direct DNA transformation or pathogen-mediated transfection. Such techniques are described in a number of generally available reviews (see, e.g., Hobbs in McGraw Hill, Yearbook of Science and Technology, pp. 191-196 (1992)).

[0752] An insect system may also be used to express a polypeptide of interest. For example, in one such system, Autographa californica nuclear polyhedrosis virus (AcNPV) is used as a vector to express foreign genes in Spodoptera frugiperda cells or in Trichoplusia cells. The sequences encoding the polypeptide may be cloned into a non-essential region of the virus, such as the polyhedrin gene, and placed under control of the polyhedrin promoter. Successful insertion of the polypeptide-encoding sequence will render the polyhedrin gene inactive and produce recombinant virus lacking coat protein. The recombinant viruses may then be used to infect, for example, S. frugiperda cells or Trichoplusia cells in which the polypeptide of interest may be expressed (Engelhard et al., Proc. Natl. Acad. Sci. U.S.A. 91:3224-3227 (1994)). Also included are baculovirus expression systems, including those that utilize SF9, SF21, and T. ni cells (see, e.g., Murphy and Piwnica-Worms, Curr Protoc Protein Sci. Chapter 5:Unit5.4, 2001). Insect systems can provide post-translation modifications that are similar to mammalian systems.

[0753] In mammalian host cells, a number of viral-based expression systems are generally available. For example, in cases where an adenovirus is used as an expression vector, sequences encoding a polypeptide of interest may be ligated into an adenovirus transcription/translation complex consisting of the late promoter and tripartite leader sequence. Insertion in a non-essential E1 or E3 region of the viral genome may be used to obtain a viable virus which is capable of expressing the polypeptide in infected host cells (Logan & Shenk, Proc. Natl. Acad. Sci. U.S.A. 81:3655-3659 (1984)). In addition, transcription enhancers, such as the Rous sarcoma virus (RSV) enhancer, may be used to increase expression in mammalian host cells.

[0754] Examples of useful mammalian host cell lines include monkey kidney CV1 line transformed by SV40 (COS-7, ATCC CRL 1651); human embryonic kidney line (293 or 293 cells sub-cloned for growth in suspension culture, Graham et al., J. Gen Virol. 36:59 (1977)); baby hamster kidney cells (BHK, ATCC CCL 10); mouse sertoli cells (TM4, Mather, Biol. Reprod. 23:243-251 (1980)); monkey kidney cells (CV1 ATCC CCL 70); African green monkey kidney cells (VERO-76, ATCC CRL-1587); human cervical carcinoma cells (HELA, ATCC CCL 2); canine kidney cells (MDCK, ATCC CCL 34); buffalo rat liver cells (BRL 3A, ATCC CRL 1442); human lung cells (W138, ATCC CCL 75); human liver cells (Hep G2, HB 8065); mouse mammary tumor (MMT 060562, ATCC CCL51); TRI cells (Mather et al., Annals N.Y. Acad. Sci. 383:44-68 (1982)); MRC 5 cells; FS4 cells; and a human hepatoma line (Hep G2). Other useful mammalian host cell lines include Chinese hamster ovary (CHO) cells, including DHFR-CHO cells (Urlaub et al., PNAS USA 77:4216 (1980)); and myeloma cell lines such as NSO and Sp2/0. For a review of certain mammalian host cell lines suitable for protein production, see, e.g., Yazaki and Wu, Methods in Molecular Biology, Vol. 248 (B. K. C Lo, ed., Humana Press, Totowa, N.J., 2003), pp. 255-268. Certain preferred mammalian cell expression systems include CHO and HEK293-cell based expression systems. Mammalian expression systems can utilize attached cell lines, for example, in T-flasks, roller bottles, or cell factories, or suspension cultures, for example, in 1L and 5L spinners, 5L, 14L, 40L, 100L and 200L stir tank bioreactors, or 20/50L and 100/200L WAVE bioreactors, among others known in the art.

[0755] Also included is the cell-free expression of proteins. These and related embodiments typically utilize purified RNA polymerase, ribosomes, tRNA and ribonucleotides; these reagents may be produced by extraction from cells or from a cell-based expression system.

[0756] Specific initiation signals may also be used to achieve more efficient translation of sequences encoding a polypeptide of interest. Such signals include the ATG initiation codon and adjacent sequences. In cases where sequences encoding the polypeptide, its initiation codon, and upstream sequences are inserted into the appropriate expression vector, no additional transcriptional or translational control signals may be needed. However, in cases where only coding sequence, or a portion thereof, is inserted, exogenous translational control signals including the ATG initiation codon should be provided. Furthermore, the initiation codon should be in the correct reading frame to ensure translation of the entire insert. Exogenous translational elements and initiation codons may be of various origins, both natural and synthetic. The efficiency of expression may be enhanced by the inclusion of enhancers which are appropriate for the particular cell system which is used, such as those described in the literature (Scharf. et al., Results Probl. Cell Differ. 20:125-162 (1994)).

[0757] In addition, a host cell strain may be chosen for its ability to modulate the expression of the inserted sequences or to process the expressed protein in the desired fashion. Such modifications of the polypeptide include, but are not limited to, post-translational modifications such as acetylation, carboxylation, glycosylation, phosphorylation, lipidation, and acylation. Post-translational processing which cleaves a “prepro” form of the protein may also be used to facilitate correct insertion, folding and/or function. Different host cells such as yeast, CHO, HeLa, MDCK, HEK293, and W138, in addition to bacterial cells, which have or even lack specific cellular machinery and characteristic mechanisms for such post-translational activities, may be chosen to ensure the correct modification and processing of the foreign protein.

[0758] For long-term, high-yield production of recombinant proteins, stable expression is generally preferred. For example, cell lines which stably express a polynucleotide of interest may be transformed using expression vectors which may contain viral origins of replication and/or endogenous expression elements and a selectable marker gene on the same or on a separate vector. Following the introduction of the vector, cells may be allowed to grow for about 1-2 days in an enriched media before they are switched to selective media. The purpose of the selectable marker is to confer resistance to selection, and its presence allows growth and recovery of cells which successfully express the introduced sequences. Resistant clones of stably transformed cells may be proliferated using tissue culture techniques appropriate to the cell type. Transient production, such as by transient transfection or infection, can also be employed. Exemplary mammalian expression systems that are suitable for transient production include HEK293 and CHO-based systems.

[0759] Any number of selection systems may be used to recover transformed or transduced cell lines. These include, but are not limited to, the herpes simplex virus thymidine kinase (Wigler et al., Cell 11:223-232 (1977)) and adenine phosphoribosyltransferase (Lowy et al., Cell 22:817-823 (1990)) genes which can be employed in tk- or aprt- cells, respectively. Also, antimetabolite, antibiotic or herbicide resistance can be used as the basis for selection; for example, dhfr which confers resistance to methotrexate (Wigler et al., Proc. Natl. Acad. Sci. U.S.A. 77:3567-70 (1980)); npt, which confers resistance to the aminoglycosides, neomycin and G-418 (Colbere-Garapin et al., J. Mol. Biol. 150:1-14 (1981)); and als or pat, which confer resistance to chlorsulfuron and phosphinotricin acetyltransferase, respectively (Murry, supra). Additional selectable genes have been described, for example, trpB, which allows cells to utilize indole in place of tryptophan, or hisD, which allows cells to utilize histinol in place of histidine (Hartman & Mulligan, Proc. Natl. Acad. Sci. U.S.A. 85:8047-51 (1988)). The use of visible markers has gained popularity with such markers as green fluorescent protein (GFP) and other fluorescent proteins (e.g., RFP, YFP), anthocyanins, β-glucuronidase and its substrate GUS, and luciferase and its substrate luciferin, being widely used not only to identify transformants, but also to quantify the amount of transient or stable protein expression attributable to a specific vector system (see, e.g., Rhodes et al., Methods Mol. Biol. 55:121-131 (1995)).

[0760] Also included are high-throughput protein production systems, or micro-production systems. Certain aspects may utilize, for example, hexa-histidine fusion tags for protein expression and purification on metal chelate-modified slide surfaces or MagneHis Ni-Particles (see, e.g., Kwon et al., BMC Biotechnol. 9:72, 2009; and Lin et al., Methods Mol Biol. 498:129-41, 2009)). Also included are high-throughput cell-free protein expression systems (see, e.g., Sitaraman et al., Methods Mol Biol. 498:229-44, 2009).

[0761] A variety of protocols for detecting and measuring the expression of polynucleotide-encoded products, using binding agents or antibodies such as polyclonal or monoclonal antibodies specific for the product, are known in the art. Examples include enzyme-linked immunosorbent assay (ELISA), western immunoblots, radioimmunoassays (RIA), and fluorescence activated cell sorting (FACS). These and other assays are described, among other places, in Hampton et al., Serological Methods, a Laboratory Manual (1990) and Maddox et al., J. Exp. Med. 158:1211-1216 (1983).

[0762] A wide variety of labels and conjugation techniques are known by those skilled in the art and may be used in various nucleic acid and amino acid assays. Means for producing labeled hybridization or PCR probes for detecting sequences related to polynucleotides include oligolabeling, nick translation, end-labeling or PCR amplification using a labeled nucleotide. Alternatively, the sequences, or any portions thereof may be cloned into a vector for the production of an mRNA probe. Such vectors are known in the art, are commercially available, and may be used to synthesize RNA probes in vitro by addition of an appropriate RNA polymerase such as T7, T3, or SP6 and labeled nucleotides. These procedures may be conducted using a variety of commercially available kits. Suitable reporter molecules or labels, which may be used include radionuclides, enzymes, fluorescent, chemiluminescent, or chromogenic agents as well as substrates, cofactors, inhibitors, magnetic particles, and the like.

[0763] Host cells transformed with one or more polynucleotide sequences of interest may be cultured under conditions suitable for the expression and recovery of the protein from cell culture. Certain specific embodiments utilize serum free cell expression systems. Examples include HEK293 cells and CHO cells that can grown on serum free medium (see, e.g., Rosser et al., Protein Expr. Purif. 40:237-43, 2005; and U.S. Pat. No. 6,210,922).

[0764] A protein produced by a recombinant cell may be secreted or contained intracellularly depending on the sequence and/or the vector used. As will be understood by those of skill in the art, expression vectors containing polynucleotides may be designed to contain signal sequences which direct secretion of the encoded polypeptide through a prokaryotic or eukaryotic cell membrane. Other recombinant constructions may be used to join sequences encoding a polypeptide of interest to nucleotide sequence encoding a polypeptide domain which will facilitate purification and/or detection of soluble proteins. Examples of such domains include cleavable and non-cleavable affinity purification and epitope tags such as avidin, FLAG tags, poly-histidine tags (e.g., 6×His), cMyc tags, V5-tags, glutathione S-transferase (GST) tags, and others.

[0765] The protein produced by a recombinant cell can be purified and characterized according to a variety of techniques known in the art. Exemplary systems for performing protein purification and analyzing protein purity include fast protein liquid chromatography (FPLC) (e.g., AKTA and Bio-Rad FPLC systems), high-pressure liquid chromatography (HPLC) (e.g., Beckman and Waters HPLC). Exemplary chemistries for purification include ion exchange chromatography (e.g., Q, S), size exclusion chromatography, salt gradients, affinity purification (e.g., Ni, Co, FLAG, maltose, glutathione, protein A/G), gel filtration, reverse-phase, ceramic HYPERD® ion exchange chromatography, and hydrophobic interaction columns (HIC), among others known in the art. Also included are analytical methods such as SDS-PAGE (e.g., coomassie, silver stain), immunoblot, Bradford, and ELISA, which may be utilized during any step of the production or purification process, typically to measure the purity of the protein composition.

[0766] Also included are methods of concentrating the proteins described herein (e.g., fusion proteins, anti-denatured collagen antibodies and antigen-binding fragments thereof), and composition comprising concentrated soluble proteins. In some aspects, such concentrated solutions comprise protein(s) at a concentration of about or at least about 5 mg/mL, 8 mg/mL, 10 mg/mL, 15 mg/mL, 20 mg/mL, or more.

[0767] In some aspects, such compositions may be substantially monodisperse, meaning that a protein exists primarily (i.e., at least about 90%, or greater) in one apparent molecular weight form when assessed for example, by size exclusion chromatography, dynamic light scattering, or analytical ultracentrifugation.

[0768] In some aspects, such compositions have a purity (on a protein basis) of at least about 90%, or in some aspects at least about 95% purity, or in some embodiments, at least 98% purity. Purity may be determined via any routine analytical method as known in the art.

[0769] In some aspects, such compositions have a high molecular weight aggregate content of less than about 10%, compared to the total amount of protein present, or in some embodiments such compositions have a high molecular weight aggregate content of less than about 5%, or in some aspects such compositions have a high molecular weight aggregate content of less than about 3%, or in some embodiments a high molecular weight aggregate content of less than about 1%. High molecular weight aggregate content may be determined via a variety of analytical techniques including for example, by size exclusion chromatography, dynamic light scattering, or analytical ultracentrifugation.

[0770] Examples of concentration approaches contemplated herein include lyophilization, which is typically employed when the solution contains few soluble components other than the protein of interest. Lyophilization is often performed after HPLC run, and can remove most or all volatile components from the mixture. Also included are ultrafiltration techniques, which typically employ one or more selective permeable membranes to concentrate a protein solution. The membrane allows water and small molecules to pass through and retains the protein; the solution can be forced against the membrane by mechanical pump, gas pressure, or centrifugation, among other techniques.

[0771] In certain embodiments, a protein in a composition has a purity of at least about 90%, as measured according to routine techniques in the art. In certain embodiments, such as diagnostic compositions or certain pharmaceutical or therapeutic compositions, a protein composition has a purity of at least about 95%, or at least about 97% or 98% or 99%. In some embodiments, such as when being used as reference or research reagents, proteins can be of lesser purity, and may have a purity of at least about 50%, 60%, 70%, or 80%. Purity can be measured overall or in relation to selected components, such as other proteins, e.g., purity on a protein basis.

[0772] Purified proteins can also be characterized according to their biological characteristics. Binding affinity and binding kinetics can be measured according to a variety of techniques known in the art, such as Biacore® and related technologies that utilize surface plasmon resonance (SPR), an optical phenomenon that enables detection of unlabeled interactants in real time. SPR-based biosensors can be used in determination of active concentration, screening and characterization in terms of both affinity and kinetics. The presence or levels of one or more biological activities can be measured according to cell-based assays, including those that utilize at least one IL-2 receptor and/or IL-15 receptor, which is optionally functionally coupled to a readout or indicator, such as a fluorescent or luminescent indicator of biological activity, as described herein.

[0773] In certain embodiments, as noted above, a composition is substantially endotoxin free, including, for example, about 95% endotoxin free, preferably about 99% endotoxin free, and more preferably about 99.99% endotoxin free. The presence of endotoxins can be detected according to routine techniques in the art, as described herein. In specific embodiments, a protein composition is made from a eukaryotic cell such as a mammalian or human cell in substantially serum free media. In certain embodiments, as noted herein, an composition has an endotoxin content of less than about 10 EU/mg of protein, or less than about 5 EU/mg of protein, less than about 3 EU/mg of protein, or less than about 1 EU/mg of protein.

[0774] In certain embodiments, a composition comprises less than about 10% wt/wt high molecular weight aggregates, or less than about 5% wt/wt high molecular weight aggregates, or less than about 2% wt/wt high molecular weight aggregates, or less than about or less than about 1% wt/wt high molecular weight aggregates.

[0775] Also included are protein-based analytical assays and methods, which can be used to assess, for example, protein purity, size, solubility, and degree of aggregation, among other characteristics. Protein purity can be assessed a number of ways. For instance, purity can be assessed based on primary structure, higher order structure, size, charge, hydrophobicity, and glycosylation. Examples of methods for assessing primary structure include N- and C-terminal sequencing and peptide-mapping (see, e.g., Allen et al., Biologicals. 24:255-275, 1996)). Examples of methods for assessing higher order structure include circular dichroism (see, e.g., Kelly et al., Biochim Biophys Acta. 1751:119-139, 2005), fluorescent spectroscopy (see, e.g., Meagher et al., J. Biol. Chem. 273:23283-89, 1998), FT-IR, amide hydrogen-deuterium exchange kinetics, differential scanning calorimetry, NMR spectroscopy, immunoreactivity with conformationally sensitive antibodies. Higher order structure can also be assessed as a function of a variety of parameters such as pH, temperature, or added salts. Examples of methods for assessing protein characteristics such as size include analytical ultracentrifugation and size exclusion HPLC (SEC-HPLC), and exemplary methods for measuring charge include ion-exchange chromatography and isolectric focusing. Hydrophobicity can be assessed, for example, by reverse-phase HPLC and hydrophobic interaction chromatography HPLC. Glycosylation can affect pharmacokinetics (e.g., clearance), conformation or stability, receptor binding, and protein function, and can be assessed, for example, by mass spectrometry and nuclear magnetic resonance (NMR) spectroscopy.

[0776] As noted above, certain embodiments include the use of SEC-HPLC to assess protein characteristics such as purity, size (e.g., size homogeneity) or degree of aggregation, and/or to purify proteins, among other uses. SEC, also including gel-filtration chromatography (GFC) and gel-permeation chromatography (GPC), refers to a chromatographic method in which molecules in solution are separated in a porous material based on their size, or more specifically their hydrodynamic volume, diffusion coefficient, and/or surface properties. The process is generally used to separate biological molecules, and to determine molecular weights and molecular weight distributions of polymers. Typically, a biological or protein sample (such as a protein extract produced according to the protein expression methods provided herein and known in the art) is loaded into a selected size-exclusion column with a defined stationary phase (the porous material), preferably a phase that does not interact with the proteins in the sample. In certain aspects, the stationary phase is composed of inert particles packed into a dense three-dimensional matrix within a glass or steel column. The mobile phase can be pure water, an aqueous buffer, an organic solvent, or a mixture thereof. The stationary-phase particles typically have small pores and/or channels which only allow molecules below a certain size to enter. Large particles are therefore excluded from these pores and channels, and their limited interaction with the stationary phase leads them to elute as a “totally-excluded” peak at the beginning of the experiment. Smaller molecules, which can fit into the pores, are removed from the flowing mobile phase, and the time they spend immobilized in the stationary-phase pores depends, in part, on how far into the pores they penetrate. Their removal from the mobile phase flow causes them to take longer to elute from the column and results in a separation between the particles based on differences in their size. A given size exclusion column has a range of molecular weights that can be separated. Overall, molecules larger than the upper limit will not be trapped by the stationary phase, molecules smaller than the lower limit will completely enter the solid phase and elute as a single band, and molecules within the range will elute at different rates, defined by their properties such as hydrodynamic volume. For examples of these methods in practice with pharmaceutical proteins, see Bruner et al., Journal of Pharmaceutical and Biomedical Analysis. 15: 1929-1935, 1997.

[0777] Protein purity for clinical applications is also discussed, for example, by Anicetti et al. (Trends in Biotechnology. 7:342-349, 1989). More recent techniques for analyzing protein purity include, without limitation, the LabChip GXII, an automated platform for rapid analysis of proteins and nucleic acids, which provides high throughput analysis of titer, sizing, and purity analysis of proteins. In certain non-limiting embodiments, clinical grade proteins can be obtained by utilizing a combination of chromatographic materials in at least two orthogonal steps, among other methods (see, e.g., Therapeutic Proteins: Methods and Protocols. Vol. 308, Eds., Smales and James, Humana Press Inc., 2005). Typically, protein agents are substantially endotoxin-free, as measured according to techniques known in the art and described herein.

[0778] Protein solubility assays are also included. Such assays can be utilized, for example, to determine optimal growth and purification conditions for recombinant production, to optimize the choice of buffer(s), and to optimize the choice of proteins and variants thereof. Solubility or aggregation can be evaluated according to a variety of parameters, including temperature, pH, salts, and the presence or absence of other additives. Examples of solubility screening assays include, without limitation, microplate-based methods of measuring protein solubility using turbidity or other measure as an end point, high-throughput assays for analysis of the solubility of purified recombinant proteins (see, e.g., Stenvall et al., Biochim Biophys Acta. 1752:6-10, 2005), assays that use structural complementation of a genetic marker protein to monitor and measure protein folding and solubility in vivo (see, e.g., Wigley et al., Nature Biotechnology. 19:131-136, 2001), and electrochemical screening of recombinant protein solubility in Escherichia coli using scanning electrochemical microscopy (SECM) (see, e.g., Nagamine et al., Biotechnology and Bioengineering. 96:1008-1013, 2006), among others. Proteins with increased solubility (or reduced aggregation) can be identified or selected for according to routine techniques in the art, including simple in vivo assays for protein solubility (see, e.g., Maxwell et al., Protein Sci. 8:1908-11, 1999).

[0779] Protein solubility and aggregation can also be measured by dynamic light scattering techniques. Aggregation is a general term that encompasses several types of interactions or characteristics, including soluble/insoluble, covalent/noncovalent, reversible/irreversible, and native/denatured interactions and characteristics. For protein therapeutics, the presence of aggregates is typically considered undesirable because of the concern that aggregates may cause an immunogenic reaction (e.g., small aggregates), or may cause adverse events on administration (e.g., particulates). Dynamic light scattering refers to a technique that can be used to determine the size distribution profile of small particles in suspension or polymers such as proteins in solution. This technique, also referred to as photon correlation spectroscopy (PCS) or quasi-elastic light scattering (QELS), uses scattered light to measure the rate of diffusion of the protein particles. Fluctuations of the scattering intensity can be observed due to the Brownian motion of the molecules and particles in solution. This motion data can be conventionally processed to derive a size distribution for the sample, wherein the size is given by the Stokes radius or hydrodynamic radius of the protein particle. The hydrodynamic size depends on both mass and shape (conformation). Dynamic scattering can detect the presence of very small amounts of aggregated protein (<0.01% by weight), even in samples that contain a large range of masses. It can also be used to compare the stability of different formulations, including, for example, applications that rely on real-time monitoring of changes at elevated temperatures. Accordingly, certain embodiments include the use of dynamic light scattering to analyze the solubility and/or presence of aggregates in a sample that contains a protein of the present disclosure.

[0780] Although the foregoing embodiments have been described in some detail by way of illustration and example for purposes of clarity of understanding, it will be readily apparent to one of ordinary skill in the art in light of the teachings of this disclosure that certain changes and modifications may be made thereto without departing from the spirit or scope of the appended claims. The following examples are provided by way of illustration only and not by way of limitation. Those of skill in the art will readily recognize a variety of noncritical parameters that could be changed or modified to yield essentially similar results.

### EXAMPLES

### Example 1

### Engineering of Antibodies Specific to Denatured Human Collagen

[0781] Experiments were performed to engineer antibodies that specifically bind to thermally-denatured human collagen types I, III, IV and V, but not to the corresponding native forms. Experiments were also performed to engineer antibodies that specifically bind to thermally-denatured human collagen types III and IV, and to the native form of human collagen IV. Amino acid sequences of the CDRs and variable regions are provided in Table A1, Table A2, and FIGS. 16A-16E.

[0782] Plasmids coding for heavy chain and light chain were constructed by standard gene synthesis, followed by sub-cloning into pTT5 expression vector. The antibody names relative to the heavy and light chain alignments in FIGS. 16A-16E are provided in Table E1 below.

TABLE E1

| Antibody Name | V_{H} Chain | V_{L} Chain |
|---|---|---|
| P27122713 | B7 | B7 |
| P27122714 | B7 | B7Q |
| P27122716 | B7 | D3 |
| P27152716 | D3 | D3 |
| P27152714 | D3 | B7Q |
| P27522716 | D3-3a | D3 |
| P27532716 | D3-3b | D3 |
| P27542716 | D3-3c | D3 |
| P27552716 | D3-3d | D3 |
| P27562716 | D3-3e | D3 |
| P27572716 | D3-3f | D3 |
| P27582716 | D3-3g | D3 |
| P27592716 | D3-3h | D3 |
| P27602716 | D3-3i | D3 |
| P27612716 | D3-3j | D3 |
| P27622716 | D3VHa | D3 |
| P27632716 | D3VHb | D3 |
| P27642716 | D3VHc | D3 |
| P27652716 | D3VHd | D3 |
| P27662716 | D3VHe | D3 |
| P27122797 | B7 | B7S |
| P27122798 | B7 | B7A |
| P27152797 | D3 | B7S |
| P27152798 | D3 | B7A |
| P29342939 | H8VHa | H8VLa |
| P29352939 | H8VHb | H8VLa |
| P29362939 | H8VHc | H8VLa |
| P29372939 | H8VHd | H8VLa |
| P29382939 | H8VHe | H8VLa |
| P30392939 | H8VHf | H8VLa |
| P30402939 | H8VHg | H8VLa |
| P30412939 | H8VHh | H8VLa |
| P30422939 | H8VHi | H8VLa |
| P30432939 | H8VHj | H8VLa |
| P30442939 | H8VHk | H8VLa |
| P30452939 | H8VHl | H8VLa |
| P30393046 | H8VHf | H8VLb |
| P30403046 | H8VHg | H8VLb |
| P30413046 | H8VHh | H8VLb |
| P30423046 | H8VHi | H8VLb |
| P30433046 | H8VHj | H8VLb |
| P30443046 | H8VHk | H8VLb |
| P30453046 | H8VHl | H8VLb |

[0783] Production, purification and characterization. Antibodies were produced by transient transfection in Expi293 cells and purified by a one-step purification process of MabSelect SuRe chromatography (GE Healthcare). Purified proteins were characterized by SDS-PAGE for purity assessment and showed good purity as shown in FIGS. 3A-3B.

[0784] Purified proteins were also characterized by high performance liquid chromatography (HPLC) for homogeneity assessment. HPLC analysis was performed using a Zenix-C SEC-300 or Nanofilm SEC-250 column (Sepax) and Acquity Arc (Agilent) according to the manufacturer's instructions. Representative HPLC results are shown in FIGS. 4A-4D. Most of the proteins showed one single peak, indicating good homogeneity.

[0785] ELISA analysis. The binding activity and specificity of purified antibodies were determined by ELISA. Human collagens I (ab7533, Abcam), III (ab7535, Abcam), IV (ab7536, Abcam), an V (ab7537, Abcam), and mouse collagens I (NBP2-62423, NOVUS) and IV (3410-010-02, R&D) were used in ELISA analysis. “Denatured” collagen samples were prepared by incubation of collagens samples at 99° C. for 15 minutes followed by incubation on ice for 5 minutes Microtiter plates were coated with native or denatured collagen protein overnight at 4° C. The next day, plates were washed with PBS and blocked with 3% non-fat dry milk in PBS or 1% BSA. Serially diluted antibodies were added for binding to the coated antigen. Bound antibodies were detected with peroxidase-conjugated anti-human IgG secondary antibody (Jackson ImmunoResearch). The results were summarized in FIGS. 7, 8 and 9.

[0786] Antibodies exhibited binding activity for denatured human collagen I (FIGS. 5A-5F) and for denatured human collagen type IV (FIGS. 5G-5L). None of the antibodies had significant binding activity for native human collagen types I or IV (FIGS. 6A-6E). The P27122713, P27152716, and P27152798 antibodies showed binding activity for denatured human collagen type III (FIG. 5M) and type V (FIG. 5N), and also for denatured mouse collagen IV (FIG. 5O). P27152716 also exhibited binding activity to denatured mouse collagen I (FIG. 5P).

[0787] Antibodies exhibited binding activity for denatured human collagen types I (FIG. 7A), IV (FIG. 7B), and V (FIG. 7D), and also to denatured mouse collagen IV (FIG. 7E). None of the antibodies showed significant binding activity towards denatured human collagen type III (FIG. 7C), or towards native human collagen types I, III, or V, or native mouse collagen I (FIG. 7F). However, all of the antibodies exhibited binding activity for native human and mouse collagen IV (FIGS. 7F, 7G, and 7H).

### Example 2

### Engineering of Collagen-Targeted IL-2 Prodrug

[0788] An IL-2 prodrug (activated by protease cleavage) was fused to the C-terminus of a collagen-targeted antibody. Plasmids coding for the fusion proteins were constructed by standard gene synthesis, followed by sub-cloning into pTT5 expression vector.

[0789] Production, purification and characterization. Fusion proteins were produced by transient transfection in Expi293 cells and purified by a two-step purification process of MabSelect SuRe chromatography (GE Healthcare) and size exclusion chromatography (Superdex 200, GE Healthcare). Purified proteins were characterized by SDS-PAGE for purity assessment and showed good purity as shown in FIGS. 8A-8B.

[0790] Purified proteins were also characterized by high performance liquid chromatography (HPLC) for homogeneity assessment. HPLC analysis was performed using Zenix-C column (Sepax) and Acquity Arc (Agilent) according to the manufacturer's instructions. Representative HPLC results were shown in FIGS. 9A-9F. Most of the proteins showed one single peak, indicating good homogeneity.

[0791] ELISA analysis. The binding activity and specificity of purified antibodies were determined by ELISA. ELISA procedures were the same as described in Example 1. The results are summarized in FIGS. 10A-10J. Purified fusion proteins exhibited binding activity for denatured human collagen type I (FIGS. 10A-10C), IV (FIGS. 10D-10F), III (FIG. 10G), and V (FIG. 10H), and showed almost no binding activity towards denatured mouse collagen IV (FIG. 10I) and native human collagen type I, III, IV, and V (FIG. 10J).

[0792] Functional assays—Proliferation. Proliferation assays were performed for purified proteins before and after protease cleavage. M-07e (IL-2Rβ/γc) cells were cultured in RPMI 1640 supplemented with 20% fetal bovine serum (FBS), 1% non-essential amino acids (NEAA), and 10% of 5637 cell culture supernatant. To measure cytokine-dependent cell proliferation, Mo7e cells were harvested in their logarithmic growth phase and washed twice with PBS. 90 μl of cell suspension (2×10⁴ cells/well) was seeded into 96-well plate and incubated for 4 hours in assay medium (RPMI 1640 supplemented with 10% FBS and 1% NEAA) for cytokine starvation at 37° C. and 5% CO2. IL-2 and purified proteins samples used in assays were prepared in assay medium to an initial concentration of 300 nM, followed by 1/3 serial dilutions. 10 μl diluted protein was added into corresponding wells and incubated at 37° C. and 5% CO2 for 72 hours. Colorimetric assays using a Cell Counting Kit-8 (CCK-8, Dojindo, CK04) were performed to measure the amount of live cells. Representative results are presented in FIGS. 11A-11B. Purified proteins before protease cleavage showed low activity and protease cleavage could recover partial or full activity of IL-2.

### Example 3

### Engineering of Collagen-Targeted IL-15 Prodrug

[0793] An IL-15 prodrug (activated by protease cleavage) was fused to the C-terminus of a collagen-targeted antibody. Plasmids coding for the fusion proteins were constructed by standard gene synthesis, followed by sub-cloning into pTT5 expression vector.

[0794] Production, purification and characterization. Fusion proteins were produced by transient transfection in Expi293 cells and purified by a two-step purification process of MabSelect SuRe chromatography (GE Healthcare) and size exclusion chromatography (Superdex 200, GE Healthcare).

[0795] Purified proteins were characterized by SDS-PAGE for purity assessment and showed good purity as shown in FIGS. 12A-12B.

[0796] Purified proteins were also characterized by high performance liquid chromatography (HPLC) for homogeneity assessment. HPLC analysis was performed using Zenix-C column (Sepax) and Acquity Arc (Agilent) according to the manufacturer's instructions. Representative HPLC results are shown in FIGS. 13A-13F. Most of the proteins showed one single peak, indicating good homogeneity.

[0797] ELISA analysis. The binding activity and specificity of purified antibodies were determined by ELISA. ELISA procedures were the same as described in Example 1. The results are summarized in FIGS. 14A-14L. Purified fusion proteins exhibited binding activity for denatured human collagen type I (FIGS. 14A-14E), IV (FIGS. 14F-14J), III (FIG. 14K), and V (FIG. 14L).

[0798] Functional assays—Proliferation. Proliferation assays were performed for purified proteins before and after protease cleavage. Assay procedures were the same as described in Example 2. Representative results are presented in FIGS. 15A-15B. Purified proteins before protease cleavage showed lower activity and protease cleavage could recover the activity of IL-15.

### Example 4

### Engineering of Collagen-Targeted Cytokine Fusion Proteins

[0799] To target cytokines to the tumor microenvironment, the cytokines IL-12, IL-7, IL-21, and IFN-α are fused to the C-terminus of a denatured collagen-targeted antibody (see, for example, Table S10). Plasmids coding for the fusion proteins are constructed by standard gene synthesis, followed by sub-cloning into pTT5 expression vector.

### Example 5

### Engineering of Bi-Specific Antibodies Targeted to Collagen and 4-1BB

[0800] Plasmids coding for bi-specific antibodies targeted to denatured human collagen and 4-1BB (see, for example, Table S10) are constructed by standard gene synthesis, followed by sub-cloning into pTT5 expression vector.

### Example 6

### Engineering of Bi-Specific Antibodies Targeted to Collagen and CD40

[0801] Plasmids coding for the bi-specific antibodies targeted to denatured human collagen and CD40 (see, for example, Table S10) are constructed by standard gene synthesis, followed by sub-cloning into pTT5 expression vector.

The application's sequence listing, which the Patent Office published only in electronic form, follows.

SEQUENCE LISTING (704 sequences)

SEQ ID NO: 1 - protein, 7 aa, Artificial Sequence
  Made in Lab - P27122713 Heavy CDR1
TSGMGVG

SEQ ID NO: 2 - protein, 16 aa, Artificial Sequence
  Made in Lab - P27122713 Heavy CDR2
DIWWDDNKYANPSLKS

SEQ ID NO: 3 - protein, 13 aa, Artificial Sequence
  Made in Lab - P27122713 Heavy CDR3
RANYGNPYYAQDY

SEQ ID NO: 4 - protein, 16 aa, Artificial Sequence
  Made in Lab - P27122713 Light CDR1
RSSQSIVHSNGNTYLE

SEQ ID NO: 5 - protein, 7 aa, Artificial Sequence
  Made in Lab - P27122713 Light CDR2
KVSNRFS

SEQ ID NO: 6 - protein, 9 aa, Artificial Sequence
  Made in Lab - P27122713 Light CDR3
FQGSHVPWT

SEQ ID NO: 7 - protein, 7 aa, Artificial Sequence
  Made in Lab - P27122714 Heavy CDR1
TSGMGVG

SEQ ID NO: 8 - protein, 16 aa, Artificial Sequence
  Made in Lab - P27122714 Heavy CDR2
DIWWDDNKYANPSLKS

SEQ ID NO: 9 - protein, 13 aa, Artificial Sequence
  Made in Lab - P27122714 Heavy CDR3
RANYGNPYYAQDY

SEQ ID NO: 10 - protein, 16 aa, Artificial Sequence
  Made in Lab - P27122714 Light CDR1
RSSQSIVHSQGNTYLE

SEQ ID NO: 11 - protein, 7 aa, Artificial Sequence
  Made in Lab - P27122714 Light CDR2
KVSNRFS

SEQ ID NO: 12 - protein, 9 aa, Artificial Sequence
  Made in Lab - P27122714 Light CDR3
FQGSHVPWT

SEQ ID NO: 13 - protein, 7 aa, Artificial Sequence
  Made in Lab - P27122716 Heavy CDR1
TSGMGVG

SEQ ID NO: 14 - protein, 16 aa, Artificial Sequence
  Made in Lab - P27122716 Heavy CDR2
DIWWDDNKYANPSLKS

SEQ ID NO: 15 - protein, 13 aa, Artificial Sequence
  Made in Lab - P27122716 Heavy CDR3
RANYGNPYYAQDY

SEQ ID NO: 16 - protein, 16 aa, Artificial Sequence
  Made in Lab - P27122716 Light CDR1
RSSQSIVSSWGNTYLE

SEQ ID NO: 17 - protein, 7 aa, Artificial Sequence
  Made in Lab - P27122716 Light CDR2
KVSNRFS

SEQ ID NO: 18 - protein, 9 aa, Artificial Sequence
  Made in Lab - P27122716 Light CDR3
FQGSHVPWT

SEQ ID NO: 19 - protein, 7 aa, Artificial Sequence
  Made in Lab - P27152716 Heavy CDR1
TPGMGVW

SEQ ID NO: 20 - protein, 16 aa, Artificial Sequence
  Made in Lab - P27152716 Heavy CDR2
DIWWDDNKYTNPSLKS

SEQ ID NO: 21 - protein, 13 aa, Artificial Sequence
  Made in Lab - P27152716 Heavy CDR3
RANYGNPYYAQDY

SEQ ID NO: 22 - protein, 16 aa, Artificial Sequence
  Made in Lab - P27152716 Light CDR1
RSSQSIVSSWGNTYLE

SEQ ID NO: 23 - protein, 7 aa, Artificial Sequence
  Made in Lab - P27152716 Light CDR2
KVSNRFS

SEQ ID NO: 24 - protein, 9 aa, Artificial Sequence
  Made in Lab - P27152716 Light CDR3
FQGSHVPWT

SEQ ID NO: 25 - protein, 7 aa, Artificial Sequence
  Made in Lab - P27152714 Heavy CDR1
TPGMGVW

SEQ ID NO: 26 - protein, 16 aa, Artificial Sequence
  Made in Lab - P27152714 Heavy CDR2
DIWWDDNKYTNPSLKS

SEQ ID NO: 27 - protein, 13 aa, Artificial Sequence
  Made in Lab - P27152714 Heavy CDR3
RANYGNPYYAQDY

SEQ ID NO: 28 - protein, 16 aa, Artificial Sequence
  Made in Lab - P27152714 Light CDR1
RSSQSIVHSQGNTYLE

SEQ ID NO: 29 - protein, 7 aa, Artificial Sequence
  Made in Lab - P27152714 Light CDR2
KVSNRFS

SEQ ID NO: 30 - protein, 9 aa, Artificial Sequence
  Made in Lab - P27152714 Light CDR3
FQGSHVPWT

SEQ ID NO: 31 - protein, 7 aa, Artificial Sequence
  Made in Lab - P27522716 Heavy CDR1
TPGMGVW

SEQ ID NO: 32 - protein, 16 aa, Artificial Sequence
  Made in Lab - P27522716 Heavy CDR2
DIWWDDNKYTNPSLKS

SEQ ID NO: 33 - protein, 13 aa, Artificial Sequence
  Made in Lab - P27522716 Heavy CDR3
RANYGNPYYAQDY

SEQ ID NO: 34 - protein, 16 aa, Artificial Sequence
  Made in Lab - P27522716 Light CDR1
RSSQSIVSSWGNTYLE

SEQ ID NO: 35 - protein, 7 aa, Artificial Sequence
  Made in Lab - P27522716 Light CDR2
KVSNRFS

SEQ ID NO: 36 - protein, 9 aa, Artificial Sequence
  Made in Lab - P27522716 Light CDR3
FQGSHVPWT

SEQ ID NO: 37 - protein, 7 aa, Artificial Sequence
  Made in Lab - P27532716 Heavy CDR1
TPGMGVW

SEQ ID NO: 38 - protein, 16 aa, Artificial Sequence
  Made in Lab - P27532716 Heavy CDR2
DIWWDDNKYTNPSLKS

SEQ ID NO: 39 - protein, 13 aa, Artificial Sequence
  Made in Lab - P27532716 Heavy CDR3
RANYGNPYYAQDY

SEQ ID NO: 40 - protein, 16 aa, Artificial Sequence
  Made in Lab - P27532716 Light CDR1
RSSQSIVSSWGNTYLE

SEQ ID NO: 41 - protein, 7 aa, Artificial Sequence
  Made in Lab - P27532716 Light CDR2
KVSNRFS

SEQ ID NO: 42 - protein, 9 aa, Artificial Sequence
  Made in Lab - P27532716 Light CDR3
FQGSHVPWT

SEQ ID NO: 43 - protein, 7 aa, Artificial Sequence
  Made in Lab - P27542716 Heavy CDR1
TPGMGVW

SEQ ID NO: 44 - protein, 16 aa, Artificial Sequence
  Made in Lab - P27542716 Heavy CDR2
DIWWDDNKYTNPSLKS

SEQ ID NO: 45 - protein, 13 aa, Artificial Sequence
  Made in Lab - P27542716 Heavy CDR3
RANYGNPYYAQDY

SEQ ID NO: 46 - protein, 16 aa, Artificial Sequence
  Made in Lab - P27542716 Light CDR1
RSSQSIVSSWGNTYLE

SEQ ID NO: 47 - protein, 7 aa, Artificial Sequence
  Made in Lab - P27542716 Light CDR2
KVSNRFS

SEQ ID NO: 48 - protein, 9 aa, Artificial Sequence
  Made in Lab - P27542716 Light CDR3
FQGSHVPWT

SEQ ID NO: 49 - protein, 7 aa, Artificial Sequence
  Made in Lab - P27552716 Heavy CDR1
TPGMGVW

SEQ ID NO: 50 - protein, 16 aa, Artificial Sequence
  Made in Lab - P27552716 Heavy CDR2
DIWWDDNKYTNPSLKS

SEQ ID NO: 51 - protein, 13 aa, Artificial Sequence
  Made in Lab - P27552716 Heavy CDR3
RANYGNPYYAQDY

SEQ ID NO: 52 - protein, 16 aa, Artificial Sequence
  Made in Lab - P27552716 Light CDR1
RSSQSIVSSWGNTYLE

SEQ ID NO: 53 - protein, 7 aa, Artificial Sequence
  Made in Lab - P27552716 Light CDR2
KVSNRFS

SEQ ID NO: 54 - protein, 9 aa, Artificial Sequence
  Made in Lab - P27552716 Light CDR3
FQGSHVPWT

SEQ ID NO: 55 - protein, 7 aa, Artificial Sequence
  Made in Lab - P27562716 Heavy CDR1
TPGMGVW

SEQ ID NO: 56 - protein, 16 aa, Artificial Sequence
  Made in Lab - P27562716 Heavy CDR2
DIWWDDNKYTNPSLKS

SEQ ID NO: 57 - protein, 13 aa, Artificial Sequence
  Made in Lab - P27562716 Heavy CDR3
RANYGNPYYAQDY

SEQ ID NO: 58 - protein, 16 aa, Artificial Sequence
  Made in Lab - P27562716 Light CDR1
RSSQSIVSSWGNTYLE

SEQ ID NO: 59 - protein, 7 aa, Artificial Sequence
  Made in Lab - P27562716 Light CDR2
KVSNRFS

SEQ ID NO: 60 - protein, 9 aa, Artificial Sequence
  Made in Lab - P27562716 Light CDR3
FQGSHVPWT

SEQ ID NO: 61 - protein, 7 aa, Artificial Sequence
  Made in Lab - P27572716 Heavy CDR1
TPGMGVW

SEQ ID NO: 62 - protein, 16 aa, Artificial Sequence
  Made in Lab - P27572716 Heavy CDR2
DIWWDDNKYTNPSLKS

SEQ ID NO: 63 - protein, 13 aa, Artificial Sequence
  Made in Lab - P27572716 Heavy CDR3
RANYGNPYYAQDY

SEQ ID NO: 64 - protein, 16 aa, Artificial Sequence
  Made in Lab - P27572716 Light CDR1
RSSQSIVSSWGNTYLE

SEQ ID NO: 65 - protein, 7 aa, Artificial Sequence
  Made in Lab - P275727166 Light CDR2
KVSNRFS

SEQ ID NO: 66 - protein, 9 aa, Artificial Sequence
  Made in Lab - P27572716 Light CDR3
FQGSHVPWT

SEQ ID NO: 67 - protein, 7 aa, Artificial Sequence
  Made in Lab -P27582716 Heavy CDR1
TPGMGVW

SEQ ID NO: 68 - protein, 16 aa, Artificial Sequence
  Made in Lab - P27582716 Heavy CDR2
DIWWDDNKYTNPSLKS

SEQ ID NO: 69 - protein, 13 aa, Artificial Sequence
  Made in Lab - P27582716 Heavy CDR3
RANYGNPYYAQDY

SEQ ID NO: 70 - protein, 16 aa, Artificial Sequence
  Made in Lab - P27582716 Light CDR1
RSSQSIVSSWGNTYLE

SEQ ID NO: 71 - protein, 7 aa, Artificial Sequence
  Made in Lab - P27582716 Light CDR2
KVSNRFS

SEQ ID NO: 72 - protein, 9 aa, Artificial Sequence
  Made in Lab - P27582716 Light CDR3
FQGSHVPWT

SEQ ID NO: 73 - protein, 7 aa, Artificial Sequence
  Made in Lab - P27592716 Heavy CDR1
TPGMGVW

SEQ ID NO: 74 - protein, 16 aa, Artificial Sequence
  Made in Lab - P27592716 Heavy CDR2
DIWWDDNKYTNPSLKS

SEQ ID NO: 75 - protein, 13 aa, Artificial Sequence
  Made in Lab - P27592716 Heavy CDR3
RANYGNPYYAQDY

SEQ ID NO: 76 - protein, 16 aa, Artificial Sequence
  Made in Lab - P27592716 Light CDR1
RSSQSIVSSWGNTYLE

SEQ ID NO: 77 - protein, 7 aa, Artificial Sequence
  Made in Lab - P27592716 Light CDR2
KVSNRFS

SEQ ID NO: 78 - protein, 9 aa, Artificial Sequence
  Made in Lab - P27592716 Light CDR3
FQGSHVPWT

SEQ ID NO: 79 - protein, 7 aa, Artificial Sequence
  Made in Lab - P27602716 Heavy CDR1
TPGMGVW

SEQ ID NO: 80 - protein, 16 aa, Artificial Sequence
  Made in Lab - P27602716 Heavy CDR2
DIWWDDNKYTNPSLKS

SEQ ID NO: 81 - protein, 13 aa, Artificial Sequence
  Made in Lab - P27602716 Heavy CDR3
RANYGNPYYAQDY

SEQ ID NO: 82 - protein, 16 aa, Artificial Sequence
  Made in Lab - P27602716 Light CDR1
RSSQSIVSSWGNTYLE

SEQ ID NO: 83 - protein, 7 aa, Artificial Sequence
  Made in Lab - P27602716 Light CDR2
KVSNRFS

SEQ ID NO: 84 - protein, 9 aa, Artificial Sequence
  Made in Lab - P27602716 Light CDR3
FQGSHVPWT

SEQ ID NO: 85 - protein, 7 aa, Artificial Sequence
  Made in Lab - P27612716 Heavy CDR1
TPGMGVW

SEQ ID NO: 86 - protein, 16 aa, Artificial Sequence
  Made in Lab - P27612716 Heavy CDR2
DIWWDDNKYTNPSLKS

SEQ ID NO: 87 - protein, 13 aa, Artificial Sequence
  Made in Lab - P27612716 Heavy CDR3
RANYGNPYYAQDY

SEQ ID NO: 88 - protein, 16 aa, Artificial Sequence
  Made in Lab - P27612716 Light CDR1
RSSQSIVSSWGNTYLE

SEQ ID NO: 89 - protein, 7 aa, Artificial Sequence
  Made in Lab - P27612716 Light CDR2
KVSNRFS

SEQ ID NO: 90 - protein, 9 aa, Artificial Sequence
  Made in Lab - P27612716 Light CDR3
FQGSHVPWT

SEQ ID NO: 91 - protein, 7 aa, Artificial Sequence
  Made in Lab - P27622716 Heavy CDR1
TPGMGVW

SEQ ID NO: 92 - protein, 16 aa, Artificial Sequence
  Made in Lab - P27622716 Heavy CDR2
DIWWDDNKYTNPSLKS

SEQ ID NO: 93 - protein, 13 aa, Artificial Sequence
  Made in Lab - P27622716 Heavy CDR3
RANYGNPYYAQDY

SEQ ID NO: 94 - protein, 16 aa, Artificial Sequence
  Made in Lab - P27622716 Light CDR1
RSSQSIVSSWGNTYLE

SEQ ID NO: 95 - protein, 7 aa, Artificial Sequence
  Made in Lab - P27622716 Light CDR2
KVSNRFS

SEQ ID NO: 96 - protein, 9 aa, Artificial Sequence
  Made in Lab - P27622716 Light CDR3
FQGSHVPWT

SEQ ID NO: 97 - protein, 7 aa, Artificial Sequence
  Made in Lab - P27632716 Heavy CDR1
TPGMGVW

SEQ ID NO: 98 - protein, 16 aa, Artificial Sequence
  Made in Lab - P27632716 Heavy CDR2
DIWWDDNKYTNPSLKS

SEQ ID NO: 99 - protein, 13 aa, Artificial Sequence
  Made in Lab - P27632716 Heavy CDR3
RANYGNPYYAQDY

SEQ ID NO: 100 - protein, 16 aa, Artificial Sequence
  Made in Lab - P27632716 Light CDR1
RSSQSIVSSWGNTYLE

SEQ ID NO: 101 - protein, 7 aa, Artificial Sequence
  Made in Lab - P27632716 Light CDR2
KVSNRFS

SEQ ID NO: 102 - protein, 9 aa, Artificial Sequence
  Made in Lab - P27632716 Light CDR3
FQGSHVPWT

SEQ ID NO: 103 - protein, 7 aa, Artificial Sequence
  Made in Lab - P27642716 Heavy CDR1
TPGMGVW

SEQ ID NO: 104 - protein, 16 aa, Artificial Sequence
  Made in Lab - P27642716 Heavy CDR2
DIWWDDNKYTNPSLKS

SEQ ID NO: 105 - protein, 13 aa, Artificial Sequence
  Made in Lab - P27642716 Heavy CDR3
RANYGNPYYAQDY

SEQ ID NO: 106 - protein, 16 aa, Artificial Sequence
  Made in Lab - P27642716 Light CDR1
RSSQSIVSSWGNTYLE

SEQ ID NO: 107 - protein, 7 aa, Artificial Sequence
  Made in Lab - P27642716 Light CDR2
KVSNRFS

SEQ ID NO: 108 - protein, 9 aa, Artificial Sequence
  Made in Lab - P27642716 Light CDR3
FQGSHVPWT

SEQ ID NO: 109 - protein, 7 aa, Artificial Sequence
  Made in Lab - P27652716 Heavy CDR1
TPGMGVW

SEQ ID NO: 110 - protein, 16 aa, Artificial Sequence
  Made in Lab - P27652716 Heavy CDR2
DIWWDDNKYTNPSLKS

SEQ ID NO: 111 - protein, 13 aa, Artificial Sequence
  Made in Lab - P27652716 Heavy CDR3
RANYGNPYYAQDY

SEQ ID NO: 112 - protein, 16 aa, Artificial Sequence
  Made in Lab - P27652716 Light CDR1
RSSQSIVSSWGNTYLE

SEQ ID NO: 113 - protein, 7 aa, Artificial Sequence
  Made in Lab - P27652716 Light CDR2
KVSNRFS

SEQ ID NO: 114 - protein, 9 aa, Artificial Sequence
  Made in Lab - P27652716 Light CDR3
FQGSHVPWT

SEQ ID NO: 115 - protein, 7 aa, Artificial Sequence
  Made in Lab - P27662716 Heavy CDR1
TPGMGVW

SEQ ID NO: 116 - protein, 16 aa, Artificial Sequence
  Made in Lab - P27662716 Heavy CDR2
DIWWDDNKYTNPSLKS

SEQ ID NO: 117 - protein, 13 aa, Artificial Sequence
  Made in Lab - P27662716 Heavy CDR3
RANYGNPYYAQDY

SEQ ID NO: 118 - protein, 16 aa, Artificial Sequence
  Made in Lab - P27662716 Light CDR1
RSSQSIVSSWGNTYLE

SEQ ID NO: 119 - protein, 7 aa, Artificial Sequence
  Made in Lab - P27662716 Light CDR2
KVSNRFS

SEQ ID NO: 120 - protein, 9 aa, Artificial Sequence
  Made in Lab - P27662716 Light CDR3
FQGSHVPWT

SEQ ID NO: 121 - protein, 7 aa, Artificial Sequence
  Made in Lab - P27122797 Heavy CDR1
TSGMGVG

SEQ ID NO: 122 - protein, 16 aa, Artificial Sequence
  Made in Lab - P27122797 Heavy CDR2
DIWWDDNKYANPSLKS

SEQ ID NO: 123 - protein, 13 aa, Artificial Sequence
  Made in Lab - P27122797 Heavy CDR3
RANYGNPYYAQDY

SEQ ID NO: 124 - protein, 16 aa, Artificial Sequence
  Made in Lab - P27122797 Light CDR1
RSSQSIVHSSGNTYLE

SEQ ID NO: 125 - protein, 7 aa, Artificial Sequence
  Made in Lab - P27122797 Light CDR2
KVSNRFS

SEQ ID NO: 126 - protein, 9 aa, Artificial Sequence
  Made in Lab - P27122797 Light CDR3
FQGSHVPWT

SEQ ID NO: 127 - protein, 7 aa, Artificial Sequence
  Made in Lab - P27122798 Heavy CDR1
TSGMGVG

SEQ ID NO: 128 - protein, 16 aa, Artificial Sequence
  Made in Lab - P27122798 Heavy CDR2
DIWWDDNKYANPSLKS

SEQ ID NO: 129 - protein, 13 aa, Artificial Sequence
  Made in Lab - P27122798 Heavy CDR3
RANYGNPYYAQDY

SEQ ID NO: 130 - protein, 16 aa, Artificial Sequence
  Made in Lab - P27122798 Light CDR1
RSSQSIVHSNANTYLE

SEQ ID NO: 131 - protein, 7 aa, Artificial Sequence
  Made in Lab - P27122798 Light CDR2
KVSNRFS

SEQ ID NO: 132 - protein, 9 aa, Artificial Sequence
  Made in Lab - P27122798 Light CDR3
FQGSHVPWT

SEQ ID NO: 133 - protein, 7 aa, Artificial Sequence
  Made in Lab - P27152797 Heavy CDR1
TPGMGVW

SEQ ID NO: 134 - protein, 16 aa, Artificial Sequence
  Made in Lab - P27152797 Heavy CDR2
DIWWDDNKYTNPSLKS

SEQ ID NO: 135 - protein, 13 aa, Artificial Sequence
  Made in Lab - P27152797 Heavy CDR3
RANYGNPYYAQDY

SEQ ID NO: 136 - protein, 16 aa, Artificial Sequence
  Made in Lab - P27152797 Light CDR1
RSSQSIVHSSGNTYLE

SEQ ID NO: 137 - protein, 7 aa, Artificial Sequence
  Made in Lab - P27152797 Light CDR2
KVSNRFS

SEQ ID NO: 138 - protein, 9 aa, Artificial Sequence
  Made in Lab - P27152797 Light CDR3
FQGSHVPWT

SEQ ID NO: 139 - protein, 7 aa, Artificial Sequence
  Made in Lab - P27152798 Heavy CDR1
TPGMGVW

SEQ ID NO: 140 - protein, 16 aa, Artificial Sequence
  Made in Lab - P27152798 Heavy CDR2
DIWWDDNKYTNPSLKS

SEQ ID NO: 141 - protein, 13 aa, Artificial Sequence
  Made in Lab - P27152798 Heavy CDR3
RANYGNPYYAQDY

SEQ ID NO: 142 - protein, 16 aa, Artificial Sequence
  Made in Lab - P27152798 Light CDR1
RSSQSIVHSNANTYLE

SEQ ID NO: 143 - protein, 7 aa, Artificial Sequence
  Made in Lab - P27152798 Light CDR2
KVSNRFS

SEQ ID NO: 144 - protein, 9 aa, Artificial Sequence
  Made in Lab - P27152798 Light CDR3
FQGSHVPWT

SEQ ID NO: 145 - protein, 5 aa, Artificial Sequence
  Made in Lab - P29342939 Heavy CDR1
RYWMT

SEQ ID NO: 146 - protein, 17 aa, Artificial Sequence
  Made in Lab - P29342939 Heavy CDR2
EINPDSSTANYTPYLKD

SEQ ID NO: 147 - protein, 11 aa, Artificial Sequence
  Made in Lab - P29342939 Heavy CDR3
PVDGYYDAMDP

SEQ ID NO: 148 - protein, 17 aa, Artificial Sequence
  Made in Lab - P29342939 Light CDR1
KSSQSLLNWYNQKNYLA

SEQ ID NO: 149 - protein, 7 aa, Artificial Sequence
  Made in Lab - P29342939 Light CDR2
GASTRES

SEQ ID NO: 150 - protein, 9 aa, Artificial Sequence
  Made in Lab - P29342939 Light CDR3
QNDHQYPYT

SEQ ID NO: 151 - protein, 5 aa, Artificial Sequence
  Made in Lab - P29352939 Heavy CDR1
RYWMT

SEQ ID NO: 152 - protein, 17 aa, Artificial Sequence
  Made in Lab - P29352939 Heavy CDR2
EINPDSSTANYTPYLKD

SEQ ID NO: 153 - protein, 11 aa, Artificial Sequence
  Made in Lab - P29352939 Heavy CDR3
PVDGYYDAMDP

SEQ ID NO: 154 - protein, 17 aa, Artificial Sequence
  Made in Lab - P29352939 Light CDR1
KSSQSLLNWYNQKNYLA

SEQ ID NO: 155 - protein, 7 aa, Artificial Sequence
  Made in Lab - P29352939 Light CDR2
GASTRES

SEQ ID NO: 156 - protein, 9 aa, Artificial Sequence
  Made in Lab - P29352939 Light CDR3
QNDHQYPYT

SEQ ID NO: 157 - protein, 5 aa, Artificial Sequence
  Made in Lab - P29362939 Heavy CDR1
RYWMT

SEQ ID NO: 158 - protein, 17 aa, Artificial Sequence
  Made in Lab - P29362939 Heavy CDR2
EINPDSSTANYTPYLKD

SEQ ID NO: 159 - protein, 11 aa, Artificial Sequence
  Made in Lab - P29362939 Heavy CDR3
PVDGYYDAMDP

SEQ ID NO: 160 - protein, 17 aa, Artificial Sequence
  Made in Lab - P29362939 Light CDR1
KSSQSLLNWYNQKNYLA

SEQ ID NO: 161 - protein, 7 aa, Artificial Sequence
  Made in Lab - P29362939 Light CDR2
GASTRES

SEQ ID NO: 162 - protein, 9 aa, Artificial Sequence
  Made in Lab - P29362939 Light CDR3
QNDHQYPYT

SEQ ID NO: 163 - protein, 5 aa, Artificial Sequence
  Made in Lab - P29372939 Heavy CDR1
RYWMT

SEQ ID NO: 164 - protein, 17 aa, Artificial Sequence
  Made in Lab - P29372939 Heavy CDR2
EINPDSSTANYTPYLKD

SEQ ID NO: 165 - protein, 11 aa, Artificial Sequence
  Made in Lab - P29372939 Heavy CDR3
PVDGYYDAMDP

SEQ ID NO: 166 - protein, 17 aa, Artificial Sequence
  Made in Lab - P29372939 Light CDR1
KSSQSLLNWYNQKNYLA

SEQ ID NO: 167 - protein, 7 aa, Artificial Sequence
  Made in Lab - P29372939 Light CDR2
GASTRES

SEQ ID NO: 168 - protein, 9 aa, Artificial Sequence
  Made in Lab - P29372939 Light CDR3
QNDHQYPYT

SEQ ID NO: 169 - protein, 5 aa, Artificial Sequence
  Made in Lab - P29382939 Heavy CDR1
RYWMT

SEQ ID NO: 170 - protein, 17 aa, Artificial Sequence
  Made in Lab - P29382939 Heavy CDR2
EINPDSSTANYTPYLKG

SEQ ID NO: 171 - protein, 11 aa, Artificial Sequence
  Made in Lab - P29382939 Heavy CDR3
PVDGYYDAMDP

SEQ ID NO: 172 - protein, 17 aa, Artificial Sequence
  Made in Lab - P29382939 Light CDR1
KSSQSLLNWYNQKNYLA

SEQ ID NO: 173 - protein, 7 aa, Artificial Sequence
  Made in Lab - P29382939 Light CDR2
GASTRES

SEQ ID NO: 174 - protein, 9 aa, Artificial Sequence
  Made in Lab - P29382939 Light CDR3
QNDHQYPYT

SEQ ID NO: 175 - protein, 5 aa, Artificial Sequence
  Made in Lab - P30392939 Heavy CDR1
RYWMT

SEQ ID NO: 176 - protein, 17 aa, Artificial Sequence
  Made in Lab - P30392939 Heavy CDR2
EINPDSSTANYTPYLKG

SEQ ID NO: 177 - protein, 11 aa, Artificial Sequence
  Made in Lab - P30392939 Heavy CDR3
PVDGYYDAMDP

SEQ ID NO: 178 - protein, 17 aa, Artificial Sequence
  Made in Lab - P30392939Light CDR1
KSSQSLLNWYNQKNYLA

SEQ ID NO: 179 - protein, 7 aa, Artificial Sequence
  Made in Lab - P30392939 Light CDR2
GASTRES

SEQ ID NO: 180 - protein, 9 aa, Artificial Sequence
  Made in Lab -P30392939 Light CDR3
QNDHQYPYT

SEQ ID NO: 181 - protein, 5 aa, Artificial Sequence
  Made in Lab - P30402939 Heavy CDR1
RYWMT

SEQ ID NO: 182 - protein, 17 aa, Artificial Sequence
  Made in Lab - P30402939 Heavy CDR2
EINPDSSTANYTPYLKG

SEQ ID NO: 183 - protein, 11 aa, Artificial Sequence
  Made in Lab - P30402939 Heavy CDR3
PVDAYYDAMDP

SEQ ID NO: 184 - protein, 17 aa, Artificial Sequence
  Made in Lab - P30402939 Light CDR1
KSSQSLLNWYNQKNYLA

SEQ ID NO: 185 - protein, 7 aa, Artificial Sequence
  Made in Lab - P30402939 Light CDR2
GASTRES

SEQ ID NO: 186 - protein, 9 aa, Artificial Sequence
  Made in Lab - P30402939 Light CDR3
QNDHQYPYT

SEQ ID NO: 187 - protein, 5 aa, Artificial Sequence
  Made in Lab - P30412939 Heavy CDR1
RYWMT

SEQ ID NO: 188 - protein, 17 aa, Artificial Sequence
  Made in Lab - P30412939 Heavy CDR2
EINPDASTANYTPYLKG

SEQ ID NO: 189 - protein, 11 aa, Artificial Sequence
  Made in Lab - P30412939 Heavy CDR3
PVDAYYDAMDP

SEQ ID NO: 190 - protein, 17 aa, Artificial Sequence
  Made in Lab - P30412939 Light CDR1
KSSQSLLNWYNQKNYLA

SEQ ID NO: 191 - protein, 7 aa, Artificial Sequence
  Made in Lab - P30412939 Light CDR2
GASTRES

SEQ ID NO: 192 - protein, 9 aa, Artificial Sequence
  Made in Lab - P30412939 Light CDR3
QNDHQYPYT

SEQ ID NO: 193 - protein, 5 aa, Artificial Sequence
  Made in Lab - P30422939 Heavy CDR1
RYWMT

SEQ ID NO: 194 - protein, 17 aa, Artificial Sequence
  Made in Lab - P30422939 Heavy CDR2
EINPDSSTANYTPYLKD

SEQ ID NO: 195 - protein, 11 aa, Artificial Sequence
  Made in Lab - P30422939 Heavy CDR3
PVDGYYDAMDY

SEQ ID NO: 196 - protein, 17 aa, Artificial Sequence
  Made in Lab - P30422939 Light CDR1
KSSQSLLNWYNQKNYLA

SEQ ID NO: 197 - protein, 7 aa, Artificial Sequence
  Made in Lab - P30422939 Light CDR2
GASTRES

SEQ ID NO: 198 - protein, 9 aa, Artificial Sequence
  Made in Lab - P30422939 Light CDR3
QNDHQYPYT

SEQ ID NO: 199 - protein, 5 aa, Artificial Sequence
  Made in Lab - P30432939 Heavy CDR1
RYWMT

SEQ ID NO: 200 - protein, 17 aa, Artificial Sequence
  Made in Lab - P30432939 Heavy CDR2
EINPDSSTANYTPYLKD

SEQ ID NO: 201 - protein, 11 aa, Artificial Sequence
  Made in Lab - P30432939 Heavy CDR3
PVDGYYDAMDN

SEQ ID NO: 202 - protein, 17 aa, Artificial Sequence
  Made in Lab - P30432939 Light CDR1
KSSQSLLNWYNQKNYLA

SEQ ID NO: 203 - protein, 7 aa, Artificial Sequence
  Made in Lab - P30432939 Light CDR2
GASTRES

SEQ ID NO: 204 - protein, 9 aa, Artificial Sequence
  Made in Lab - P30432939 Light CDR3
QNDHQYPYT

SEQ ID NO: 205 - protein, 5 aa, Artificial Sequence
  Made in Lab - P30442939 Heavy CDR1
RYWMT

SEQ ID NO: 206 - protein, 17 aa, Artificial Sequence
  Made in Lab -P30442939 Heavy CDR2
EINPDSSTANYTPYLKG

SEQ ID NO: 207 - protein, 11 aa, Artificial Sequence
  Made in Lab - P30442939 Heavy CDR3
PVDGYYDAMDY

SEQ ID NO: 208 - protein, 17 aa, Artificial Sequence
  Made in Lab - P30442939 Light CDR1
KSSQSLLNWYNQKNYLA

SEQ ID NO: 209 - protein, 7 aa, Artificial Sequence
  Made in Lab - P30442939 Light CDR2
GASTRES

SEQ ID NO: 210 - protein, 9 aa, Artificial Sequence
  Made in Lab - P30442939 Light CDR3
QNDHQYPYT

SEQ ID NO: 211 - protein, 5 aa, Artificial Sequence
  Made in Lab - P30452939 Heavy CDR1
RYWMT

SEQ ID NO: 212 - protein, 17 aa, Artificial Sequence
  Made in Lab - P30452939 Heavy CDR2
EINPDSSTANYTPYLKG

SEQ ID NO: 213 - protein, 11 aa, Artificial Sequence
  Made in Lab - P30452939 Heavy CDR3
PVDGYYDAMDN

SEQ ID NO: 214 - protein, 17 aa, Artificial Sequence
  Made in Lab - P30452939 Light CDR1
KSSQSLLNWYNQKNYLA

SEQ ID NO: 215 - protein, 7 aa, Artificial Sequence
  Made in Lab - P30452939 Light CDR2
GASTRES

SEQ ID NO: 216 - protein, 9 aa, Artificial Sequence
  Made in Lab - P30452939 Light CDR3
QNDHQYPYT

SEQ ID NO: 217 - protein, 5 aa, Artificial Sequence
  Made in Lab - P30393046 Heavy CDR1
RYWMT

SEQ ID NO: 218 - protein, 17 aa, Artificial Sequence
  Made in Lab - P30393046 Heavy CDR2
EINPDASTANYTPYLKG

SEQ ID NO: 219 - protein, 11 aa, Artificial Sequence
  Made in Lab - P30393046 Heavy CDR3
PVDGYYDAMDP

SEQ ID NO: 220 - protein, 17 aa, Artificial Sequence
  Made in Lab - P30393046 Light CDR1
KSSQSLLNRYNQKNYLA

SEQ ID NO: 221 - protein, 7 aa, Artificial Sequence
  Made in Lab - P303930469 Light CDR2
GASTRES

SEQ ID NO: 222 - protein, 9 aa, Artificial Sequence
  Made in Lab - P30393046 Light CDR3
QNDHQYPYT

SEQ ID NO: 223 - protein, 5 aa, Artificial Sequence
  Made in Lab - P30403046 Heavy CDR1
RYWMT

SEQ ID NO: 224 - protein, 17 aa, Artificial Sequence
  Made in Lab - P30403046  Heavy CDR2
EINPDSSTANYTPYLKG

SEQ ID NO: 225 - protein, 11 aa, Artificial Sequence
  Made in Lab - P30403046 Heavy CDR3
PVDAYYDAMDP

SEQ ID NO: 226 - protein, 17 aa, Artificial Sequence
  Made in Lab - P30403046 Light CDR1
KSSQSLLNRYNQKNYLA

SEQ ID NO: 227 - protein, 7 aa, Artificial Sequence
  Made in Lab - P30403046 Light CDR2
GASTRES

SEQ ID NO: 228 - protein, 9 aa, Artificial Sequence
  Made in Lab - P30403046 Light CDR3
QNDHQYPYT

SEQ ID NO: 229 - protein, 5 aa, Artificial Sequence
  Made in Lab - P30413046 Heavy CDR1
RYWMT

SEQ ID NO: 230 - protein, 17 aa, Artificial Sequence
  Made in Lab - P30413046  Heavy CDR2
EINPDASTANYTPYLKG

SEQ ID NO: 231 - protein, 11 aa, Artificial Sequence
  Made in Lab - P30413046 Heavy CDR3
PVDAYYDAMDP

SEQ ID NO: 232 - protein, 17 aa, Artificial Sequence
  Made in Lab - P30413046 Light CDR1
KSSQSLLNRYNQKNYLA

SEQ ID NO: 233 - protein, 7 aa, Artificial Sequence
  Made in Lab - P30413046 Light CDR2
GASTRES

SEQ ID NO: 234 - protein, 9 aa, Artificial Sequence
  Made in Lab - P30413046 Light CDR3
QNDHQYPYT

SEQ ID NO: 235 - protein, 5 aa, Artificial Sequence
  Made in Lab - P30423046 Heavy CDR1
RYWMT

SEQ ID NO: 236 - protein, 17 aa, Artificial Sequence
  Made in Lab - P30423046  Heavy CDR2
EINPDSSTANYTPYLKD

SEQ ID NO: 237 - protein, 11 aa, Artificial Sequence
  Made in Lab - P30423046 Heavy CDR3
PVDGYYDAMDY

SEQ ID NO: 238 - protein, 17 aa, Artificial Sequence
  Made in Lab - P30423046 Light CDR1
KSSQSLLNRYNQKNYLA

SEQ ID NO: 239 - protein, 7 aa, Artificial Sequence
  Made in Lab - P30423046 Light CDR2
GASTRES

SEQ ID NO: 240 - protein, 9 aa, Artificial Sequence
  Made in Lab - P30423046 Light CDR3
QNDHQYPYT

SEQ ID NO: 241 - protein, 5 aa, Artificial Sequence
  Made in Lab - P30433046 Heavy CDR1
RYWMT

SEQ ID NO: 242 - protein, 17 aa, Artificial Sequence
  Made in Lab - P30433046  Heavy CDR2
EINPDSSTANYTPYLKD

SEQ ID NO: 243 - protein, 11 aa, Artificial Sequence
  Made in Lab - P30433046 Heavy CDR3
PVDGYYDAMDN

SEQ ID NO: 244 - protein, 17 aa, Artificial Sequence
  Made in Lab - P30433046 Light CDR1
KSSQSLLNRYNQKNYLA

SEQ ID NO: 245 - protein, 7 aa, Artificial Sequence
  Made in Lab - P30433046 Light CDR2
GASTRES

SEQ ID NO: 246 - protein, 9 aa, Artificial Sequence
  Made in Lab - P30433046 Light CDR3
QNDHQYPYT

SEQ ID NO: 247 - protein, 5 aa, Artificial Sequence
  Made in Lab - P30443046 Heavy CDR1
RYWMT

SEQ ID NO: 248 - protein, 17 aa, Artificial Sequence
  Made in Lab - P30443046  Heavy CDR2
EINPDSSTANYTPYLKG

SEQ ID NO: 249 - protein, 11 aa, Artificial Sequence
  Made in Lab - P30443046 Heavy CDR3
PVDGYYDAMDY

SEQ ID NO: 250 - protein, 17 aa, Artificial Sequence
  Made in Lab - P30443046 Light CDR1
KSSQSLLNRYNQKNYLA

SEQ ID NO: 251 - protein, 7 aa, Artificial Sequence
  Made in Lab - P30443046 Light CDR2
GASTRES

SEQ ID NO: 252 - protein, 9 aa, Artificial Sequence
  Made in Lab - P30443046 Light CDR3
QNDHQYPYT

SEQ ID NO: 253 - protein, 5 aa, Artificial Sequence
  Made in Lab - P30453046 Heavy CDR1
RYWMT

SEQ ID NO: 254 - protein, 17 aa, Artificial Sequence
  Made in Lab - P30453046  Heavy CDR2
EINPDSSTANYTPYLKG

SEQ ID NO: 255 - protein, 11 aa, Artificial Sequence
  Made in Lab - P30453046 Heavy CDR3
PVDGYYDAMDN

SEQ ID NO: 256 - protein, 17 aa, Artificial Sequence
  Made in Lab - P30453046 Light CDR1
KSSQSLLNRYNQKNYLA

SEQ ID NO: 257 - protein, 7 aa, Artificial Sequence
  Made in Lab - P30453046 Light CDR2
GASTRES

SEQ ID NO: 258 - protein, 9 aa, Artificial Sequence
  Made in Lab - P30453046 Light CDR3
QNDHQYPYT

SEQ ID NO: 259 - protein, 7 aa, Artificial Sequence
  Made in Lab - HU177 Heavy CDR1
TSGMGVG

SEQ ID NO: 260 - protein, 16 aa, Artificial Sequence
  Made in Lab - HU177  Heavy CDR2
DIWWDDNKYYNPSLKS

SEQ ID NO: 261 - protein, 13 aa, Artificial Sequence
  Made in Lab - HU177 Heavy CDR3
RANYGNPYYAMDY

SEQ ID NO: 262 - protein, 16 aa, Artificial Sequence
  Made in Lab - HU177 Light CDR1
RSSQSIVHSNGNTYLE

SEQ ID NO: 263 - protein, 7 aa, Artificial Sequence
  Made in Lab - HU177 Light CDR2
KVSNRFS

SEQ ID NO: 264 - protein, 9 aa, Artificial Sequence
  Made in Lab - HU177 Light CDR3
FQGSHVPWT

SEQ ID NO: 265 - protein, 5 aa, Artificial Sequence
  Made in Lab - HUIV26 Heavy CDR1
RYWMS

SEQ ID NO: 266 - protein, 17 aa, Artificial Sequence
  Made in Lab - HUIV26  Heavy CDR2
EINPDSSTINYTPSLKD

SEQ ID NO: 267 - protein, 11 aa, Artificial Sequence
  Made in Lab - HUIV26 Heavy CDR3
PVDGYYDAMDY

SEQ ID NO: 268 - protein, 17 aa, Artificial Sequence
  Made in Lab - HUIV26 Light CDR1
KSSQSLLNSGNQKNYLA

SEQ ID NO: 269 - protein, 7 aa, Artificial Sequence
  Made in Lab - HUIV26 Light CDR2
GASTRES

SEQ ID NO: 270 - protein, 9 aa, Artificial Sequence
  Made in Lab - HUIV26 Light CDR3
QNDHSYPYT

SEQ ID NO: 271 - protein, 453 aa, Artificial Sequence
  Made in Lab - exemplary heavy chain sequence
QVTLKESGPALVKPTQTLTLTCTFSGFSLSTSGMGVGWIRQPPGKALEWLADIWWDDNKYANPSLKSRLTISKDTSKNQVVLTMTNMDPVDTATYYCARRANYGNPYYAQDYWGQGTTVTVSSASTKGPSVFPLAPSSKSTSGGTAALGCLVKDYFPEPVTVSWNSGALTSGVHTFPAVLQSSGLYSLSSVVTVPSSSLGTQTYICNVNHKPSNTKVDKKVEPKSCDKTHTCPPCPAPEAAGGPSVFLFPPKPKDTLMISRTPEVTCVVVDVSHEDPEVKFNWYVDGVEVHNAKTKPREEQYNSTYRVVSVLTVLHQDWLNGKEYKCKVSNKALAAPIEKTISKAKGQPREPQVYTLPPSRDELTKNQVSLTCLVKGFYPSDIAVEWESNGQPENNYKTTPPVLDSDGSFFLYSKLTVDKSRWQQGNVFSCSVMHEALHNHYTQKSLSLSPGK

SEQ ID NO: 272 - protein, 219 aa, Artificial Sequence
  Made in Lab - exemplary light chain sequence
DIVMTQTPLSLPVTPGEPASISCRSSQSIVHSNGNTYLEWYLQKPGQSPQLLIYKVSNRFSGVPDRFSGSGSGTDFTLKISRVEAEDVGVYYCFQGSHVPWTFGQGTKVEIKRTVAAPSVFIFPPSDEQLKSGTASVVCLLNNFYPREAKVQWKVDNALQSGNSQESVTEQDSKDSTYSLSSTLTLSKADYEKHKVYACEVTHQGLSSPVTKSFNRGEC

SEQ ID NO: 273 - protein, 453 aa, Artificial Sequence; identical to SEQ ID NO: 271
  Made in Lab - exemplary heavy chain sequence

SEQ ID NO: 274 - protein, 219 aa, Artificial Sequence
  Made in Lab - exemplary light chain sequence
DIVMTQTPLSLPVTPGEPASISCRSSQSIVHSQGNTYLEWYLQKPGQSPQLLIYKVSNRFSGVPDRFSGSGSGTDFTLKISRVEAEDVGVYYCFQGSHVPWTFGQGTKVEIKRTVAAPSVFIFPPSDEQLKSGTASVVCLLNNFYPREAKVQWKVDNALQSGNSQESVTEQDSKDSTYSLSSTLTLSKADYEKHKVYACEVTHQGLSSPVTKSFNRGEC

SEQ ID NO: 275 - protein, 453 aa, Artificial Sequence; identical to SEQ ID NO: 271
  Made in Lab - exemplary heavy chain sequence

SEQ ID NO: 276 - protein, 219 aa, Artificial Sequence
  Made in Lab - exemplary light chain sequence
DIVMTQTPLSLPVTPGEPASISCRSSQSIVSSWGNTYLEWYLQKPGQSPQLLIYKVSNRFSGVPDRFSGSGSGTDFTLKISRVEAEDVGVYYCFQGSHVPWTFGQGTKVEIKRTVAAPSVFIFPPSDEQLKSGTASVVCLLNNFYPREAKVQWKVDNALQSGNSQESVTEQDSKDSTYSLSSTLTLSKADYEKHKVYACEVTHQGLSSPVTKSFNRGEC

SEQ ID NO: 277 - protein, 453 aa, Artificial Sequence
  Made in Lab - exemplary heavy chain sequence
QVTLKESGPALVKPTQTLTLTCTFSGFSLSTPGMGVWWIRQPPGKALEWLADIWWDDNKYTNPSLKSRLTISKDTSKNQVVLTMTNMDPVDTATYYCARRANYGNPYYAQDYWGQGTTVTVSSASTKGPSVFPLAPSSKSTSGGTAALGCLVKDYFPEPVTVSWNSGALTSGVHTFPAVLQSSGLYSLSSVVTVPSSSLGTQTYICNVNHKPSNTKVDKKVEPKSCDKTHTCPPCPAPEAAGGPSVFLFPPKPKDTLMISRTPEVTCVVVDVSHEDPEVKFNWYVDGVEVHNAKTKPREEQYNSTYRVVSVLTVLHQDWLNGKEYKCKVSNKALAAPIEKTISKAKGQPREPQVYTLPPSRDELTKNQVSLTCLVKGFYPSDIAVEWESNGQPENNYKTTPPVLDSDGSFFLYSKLTVDKSRWQQGNVFSCSVMHEALHNHYTQKSLSLSPGK

SEQ ID NO: 278 - protein, 219 aa, Artificial Sequence; identical to SEQ ID NO: 276
  Made in Lab - exemplary light chain sequence

SEQ ID NO: 279 - protein, 453 aa, Artificial Sequence; identical to SEQ ID NO: 277
  Made in Lab - exemplary heavy chain sequence

SEQ ID NO: 280 - protein, 219 aa, Artificial Sequence; identical to SEQ ID NO: 274
  Made in Lab - exemplary light chain sequence

SEQ ID NO: 281 - protein, 453 aa, Artificial Sequence
  Made in Lab - exemplary heavy chain sequence
EVQLVESGGGLVQPGGSLRLSCAASGFSFSTPGMGVWWVRQAPGKGLEWVADIWWDDNKYTNPSLKSRFTISRDNAKNSLYLQMNSLRAEDTAVYYCARRANYGNPYYAQDYWGQGTTVTVSSASTKGPSVFPLAPSSKSTSGGTAALGCLVKDYFPEPVTVSWNSGALTSGVHTFPAVLQSSGLYSLSSVVTVPSSSLGTQTYICNVNHKPSNTKVDKKVEPKSCDKTHTCPPCPAPEAAGGPSVFLFPPKPKDTLMISRTPEVTCVVVDVSHEDPEVKFNWYVDGVEVHNAKTKPREEQYNSTYRVVSVLTVLHQDWLNGKEYKCKVSNKALAAPIEKTISKAKGQPREPQVYTLPPSRDELTKNQVSLTCLVKGFYPSDIAVEWESNGQPENNYKTTPPVLDSDGSFFLYSKLTVDKSRWQQGNVFSCSVMHEALHNHYTQKSLSLSPGK

SEQ ID NO: 282 - protein, 219 aa, Artificial Sequence; identical to SEQ ID NO: 276
  Made in Lab - exemplary light chain sequence

SEQ ID NO: 283 - protein, 453 aa, Artificial Sequence
  Made in Lab - exemplary heavy chain sequence
EVQLVESGGGLVQPGGSLRLSCAASGFTLSTPGMGVWWVRQAPGKGLEWVADIWWDDNKYTNPSLKSRFTISRDNAKNSLYLQMNSLRAEDTAVYYCARRANYGNPYYAQDYWGQGTTVTVSSASTKGPSVFPLAPSSKSTSGGTAALGCLVKDYFPEPVTVSWNSGALTSGVHTFPAVLQSSGLYSLSSVVTVPSSSLGTQTYICNVNHKPSNTKVDKKVEPKSCDKTHTCPPCPAPEAAGGPSVFLFPPKPKDTLMISRTPEVTCVVVDVSHEDPEVKFNWYVDGVEVHNAKTKPREEQYNSTYRVVSVLTVLHQDWLNGKEYKCKVSNKALAAPIEKTISKAKGQPREPQVYTLPPSRDELTKNQVSLTCLVKGFYPSDIAVEWESNGQPENNYKTTPPVLDSDGSFFLYSKLTVDKSRWQQGNVFSCSVMHEALHNHYTQKSLSLSPGK

SEQ ID NO: 284 - protein, 219 aa, Artificial Sequence; identical to SEQ ID NO: 276
  Made in Lab - exemplary light chain sequence

SEQ ID NO: 285 - protein, 453 aa, Artificial Sequence
  Made in Lab - exemplary heavy chain sequence
EVQLVESGGGLVQPGGSLRLSCAASGFSLSTPGMGVWWVRQAPGKGLEWVADIWWDDNKYTNPSLKSRFTISRDNAKNSLYLQMNSLRAEDTAVYYCARRANYGNPYYAQDYWGQGTTVTVSSASTKGPSVFPLAPSSKSTSGGTAALGCLVKDYFPEPVTVSWNSGALTSGVHTFPAVLQSSGLYSLSSVVTVPSSSLGTQTYICNVNHKPSNTKVDKKVEPKSCDKTHTCPPCPAPEAAGGPSVFLFPPKPKDTLMISRTPEVTCVVVDVSHEDPEVKFNWYVDGVEVHNAKTKPREEQYNSTYRVVSVLTVLHQDWLNGKEYKCKVSNKALAAPIEKTISKAKGQPREPQVYTLPPSRDELTKNQVSLTCLVKGFYPSDIAVEWESNGQPENNYKTTPPVLDSDGSFFLYSKLTVDKSRWQQGNVFSCSVMHEALHNHYTQKSLSLSPGK

SEQ ID NO: 286 - protein, 219 aa, Artificial Sequence; identical to SEQ ID NO: 276
  Made in Lab - exemplary light chain sequence

SEQ ID NO: 287 - protein, 453 aa, Artificial Sequence
  Made in Lab - exemplary heavy chain sequence
EVQLVESGGGLVQPGGSLRLSCAASGFTFSTPGMGVWWIRQAPGKGLEWVADIWWDDNKYTNPSLKSRFTISRDNAKNSLYLQMNSLRAEDTAVYYCARRANYGNPYYAQDYWGQGTTVTVSSASTKGPSVFPLAPSSKSTSGGTAALGCLVKDYFPEPVTVSWNSGALTSGVHTFPAVLQSSGLYSLSSVVTVPSSSLGTQTYICNVNHKPSNTKVDKKVEPKSCDKTHTCPPCPAPEAAGGPSVFLFPPKPKDTLMISRTPEVTCVVVDVSHEDPEVKFNWYVDGVEVHNAKTKPREEQYNSTYRVVSVLTVLHQDWLNGKEYKCKVSNKALAAPIEKTISKAKGQPREPQVYTLPPSRDELTKNQVSLTCLVKGFYPSDIAVEWESNGQPENNYKTTPPVLDSDGSFFLYSKLTVDKSRWQQGNVFSCSVMHEALHNHYTQKSLSLSPGK

SEQ ID NO: 288 - protein, 219 aa, Artificial Sequence; identical to SEQ ID NO: 276
  Made in Lab - exemplary light chain sequence

SEQ ID NO: 289 - protein, 453 aa, Artificial Sequence
  Made in Lab - exemplary heavy chain sequence
EVQLVESGGGLVQPGGSLRLSCAASGFTFSTPGMGVWWVRQAPGKGLEWLADIWWDDNKYTNPSLKSRFTISRDNAKNSLYLQMNSLRAEDTAVYYCARRANYGNPYYAQDYWGQGTTVTVSSASTKGPSVFPLAPSSKSTSGGTAALGCLVKDYFPEPVTVSWNSGALTSGVHTFPAVLQSSGLYSLSSVVTVPSSSLGTQTYICNVNHKPSNTKVDKKVEPKSCDKTHTCPPCPAPEAAGGPSVFLFPPKPKDTLMISRTPEVTCVVVDVSHEDPEVKFNWYVDGVEVHNAKTKPREEQYNSTYRVVSVLTVLHQDWLNGKEYKCKVSNKALAAPIEKTISKAKGQPREPQVYTLPPSRDELTKNQVSLTCLVKGFYPSDIAVEWESNGQPENNYKTTPPVLDSDGSFFLYSKLTVDKSRWQQGNVFSCSVMHEALHNHYTQKSLSLSPGK

SEQ ID NO: 290 - protein, 219 aa, Artificial Sequence; identical to SEQ ID NO: 276
  Made in Lab - exemplary light chain sequence

SEQ ID NO: 291 - protein, 453 aa, Artificial Sequence
  Made in Lab - exemplary heavy chain sequence
EVQLVESGGGLVQPGGSLRLSCAASGFTFSTPGMGVWWVRQAPGKGLEWVADIWWDDNKYTNPSLKSRLTISRDNAKNSLYLQMNSLRAEDTAVYYCARRANYGNPYYAQDYWGQGTTVTVSSASTKGPSVFPLAPSSKSTSGGTAALGCLVKDYFPEPVTVSWNSGALTSGVHTFPAVLQSSGLYSLSSVVTVPSSSLGTQTYICNVNHKPSNTKVDKKVEPKSCDKTHTCPPCPAPEAAGGPSVFLFPPKPKDTLMISRTPEVTCVVVDVSHEDPEVKFNWYVDGVEVHNAKTKPREEQYNSTYRVVSVLTVLHQDWLNGKEYKCKVSNKALAAPIEKTISKAKGQPREPQVYTLPPSRDELTKNQVSLTCLVKGFYPSDIAVEWESNGQPENNYKTTPPVLDSDGSFFLYSKLTVDKSRWQQGNVFSCSVMHEALHNHYTQKSLSLSPGK

SEQ ID NO: 292 - protein, 219 aa, Artificial Sequence; identical to SEQ ID NO: 276
  Made in Lab - exemplary light chain sequence

SEQ ID NO: 293 - protein, 453 aa, Artificial Sequence
  Made in Lab - exemplary heavy chain sequence
EVQLVESGGGLVQPGGSLRLSCAASGFSLSTPGMGVWWIRQAPGKGLEWVADIWWDDNKYTNPSLKSRLTISRDNAKNSLYLQMNSLRAEDTAVYYCARRANYGNPYYAQDYWGQGTTVTVSSASTKGPSVFPLAPSSKSTSGGTAALGCLVKDYFPEPVTVSWNSGALTSGVHTFPAVLQSSGLYSLSSVVTVPSSSLGTQTYICNVNHKPSNTKVDKKVEPKSCDKTHTCPPCPAPEAAGGPSVFLFPPKPKDTLMISRTPEVTCVVVDVSHEDPEVKFNWYVDGVEVHNAKTKPREEQYNSTYRVVSVLTVLHQDWLNGKEYKCKVSNKALAAPIEKTISKAKGQPREPQVYTLPPSRDELTKNQVSLTCLVKGFYPSDIAVEWESNGQPENNYKTTPPVLDSDGSFFLYSKLTVDKSRWQQGNVFSCSVMHEALHNHYTQKSLSLSPGK

SEQ ID NO: 294 - protein, 219 aa, Artificial Sequence; identical to SEQ ID NO: 276
  Made in Lab - exemplary light chain sequence

SEQ ID NO: 295 - protein, 453 aa, Artificial Sequence
  Made in Lab - exemplary heavy chain sequence
EVQLVESGGGLVQPGGSLRLSCAASGFSLSTPGMGVWWIRQAPGKGLEWLADIWWDDNKYTNPSLKSRLTISRDNAKNSLYLQMNSLRAEDTAVYYCARRANYGNPYYAQDYWGQGTTVTVSSASTKGPSVFPLAPSSKSTSGGTAALGCLVKDYFPEPVTVSWNSGALTSGVHTFPAVLQSSGLYSLSSVVTVPSSSLGTQTYICNVNHKPSNTKVDKKVEPKSCDKTHTCPPCPAPEAAGGPSVFLFPPKPKDTLMISRTPEVTCVVVDVSHEDPEVKFNWYVDGVEVHNAKTKPREEQYNSTYRVVSVLTVLHQDWLNGKEYKCKVSNKALAAPIEKTISKAKGQPREPQVYTLPPSRDELTKNQVSLTCLVKGFYPSDIAVEWESNGQPENNYKTTPPVLDSDGSFFLYSKLTVDKSRWQQGNVFSCSVMHEALHNHYTQKSLSLSPGK

SEQ ID NO: 296 - protein, 219 aa, Artificial Sequence; identical to SEQ ID NO: 276
  Made in Lab - exemplary light chain sequence

SEQ ID NO: 297 - protein, 453 aa, Artificial Sequence
  Made in Lab - exemplary heavy chain sequence
EVQLVESGGGLVQPGGSLRLSCAASGFSLSTPGMGVWWVRQAPGKGLEWLADIWWDDNKYTNPSLKSRLTISKDNAKNSLYLQMNSLRAEDTAVYYCARRANYGNPYYAQDYWGQGTTVTVSSASTKGPSVFPLAPSSKSTSGGTAALGCLVKDYFPEPVTVSWNSGALTSGVHTFPAVLQSSGLYSLSSVVTVPSSSLGTQTYICNVNHKPSNTKVDKKVEPKSCDKTHTCPPCPAPEAAGGPSVFLFPPKPKDTLMISRTPEVTCVVVDVSHEDPEVKFNWYVDGVEVHNAKTKPREEQYNSTYRVVSVLTVLHQDWLNGKEYKCKVSNKALAAPIEKTISKAKGQPREPQVYTLPPSRDELTKNQVSLTCLVKGFYPSDIAVEWESNGQPENNYKTTPPVLDSDGSFFLYSKLTVDKSRWQQGNVFSCSVMHEALHNHYTQKSLSLSPGK

SEQ ID NO: 298 - protein, 219 aa, Artificial Sequence; identical to SEQ ID NO: 276
  Made in Lab - exemplary light chain sequence

SEQ ID NO: 299 - protein, 453 aa, Artificial Sequence
  Made in Lab - exemplary heavy chain sequence
EVQLVESGGGLVQPGGSLRLSCAASGFSLSTPGMGVWWIRQAPGKGLEWLADIWWDDNKYTNPSLKSRLTISKDNAKNSLYLQMNSLRAEDTAVYYCARRANYGNPYYAQDYWGQGTTVTVSSASTKGPSVFPLAPSSKSTSGGTAALGCLVKDYFPEPVTVSWNSGALTSGVHTFPAVLQSSGLYSLSSVVTVPSSSLGTQTYICNVNHKPSNTKVDKKVEPKSCDKTHTCPPCPAPEAAGGPSVFLFPPKPKDTLMISRTPEVTCVVVDVSHEDPEVKFNWYVDGVEVHNAKTKPREEQYNSTYRVVSVLTVLHQDWLNGKEYKCKVSNKALAAPIEKTISKAKGQPREPQVYTLPPSRDELTKNQVSLTCLVKGFYPSDIAVEWESNGQPENNYKTTPPVLDSDGSFFLYSKLTVDKSRWQQGNVFSCSVMHEALHNHYTQKSLSLSPGK

SEQ ID NO: 300 - protein, 219 aa, Artificial Sequence; identical to SEQ ID NO: 276
  Made in Lab - exemplary light chain sequence

SEQ ID NO: 301 - protein, 453 aa, Artificial Sequence
  Made in Lab - exemplary heavy chain sequence
QVTLKESGPALVKPTQTLTLTCTFSGFSLSTPGMGVWWIRQPSGKALEWLADIWWDDNKYTNPSLKSRLTISKDTSKNQVVLTMTNMDPVDTATYYCARRANYGNPYYAQDYWGQGTTVTVSSASTKGPSVFPLAPSSKSTSGGTAALGCLVKDYFPEPVTVSWNSGALTSGVHTFPAVLQSSGLYSLSSVVTVPSSSLGTQTYICNVNHKPSNTKVDKKVEPKSCDKTHTCPPCPAPEAAGGPSVFLFPPKPKDTLMISRTPEVTCVVVDVSHEDPEVKFNWYVDGVEVHNAKTKPREEQYNSTYRVVSVLTVLHQDWLNGKEYKCKVSNKALAAPIEKTISKAKGQPREPQVYTLPPSRDELTKNQVSLTCLVKGFYPSDIAVEWESNGQPENNYKTTPPVLDSDGSFFLYSKLTVDKSRWQQGNVFSCSVMHEALHNHYTQKSLSLSPGK

SEQ ID NO: 302 - protein, 219 aa, Artificial Sequence; identical to SEQ ID NO: 276
  Made in Lab - exemplary light chain sequence

SEQ ID NO: 303 - protein, 453 aa, Artificial Sequence
  Made in Lab - exemplary heavy chain sequence
QVTLKESGPALVKPTQTLTLTCTFSGFSLSTPGMGVWWIRQPPGEALEWLADIWWDDNKYTNPSLKSRLTISKDTSKNQVVLTMTNMDPVDTATYYCARRANYGNPYYAQDYWGQGTTVTVSSASTKGPSVFPLAPSSKSTSGGTAALGCLVKDYFPEPVTVSWNSGALTSGVHTFPAVLQSSGLYSLSSVVTVPSSSLGTQTYICNVNHKPSNTKVDKKVEPKSCDKTHTCPPCPAPEAAGGPSVFLFPPKPKDTLMISRTPEVTCVVVDVSHEDPEVKFNWYVDGVEVHNAKTKPREEQYNSTYRVVSVLTVLHQDWLNGKEYKCKVSNKALAAPIEKTISKAKGQPREPQVYTLPPSRDELTKNQVSLTCLVKGFYPSDIAVEWESNGQPENNYKTTPPVLDSDGSFFLYSKLTVDKSRWQQGNVFSCSVMHEALHNHYTQKSLSLSPGK

SEQ ID NO: 304 - protein, 219 aa, Artificial Sequence; identical to SEQ ID NO: 276
  Made in Lab - exemplary light chain sequence

SEQ ID NO: 305 - protein, 453 aa, Artificial Sequence
  Made in Lab - exemplary heavy chain sequence
QVTLKESGPALVKPTQTLTLTCTFSGFSLSTPGMGVWWIRQPPGKGLEWLADIWWDDNKYTNPSLKSRLTISKDTSKNQVVLTMTNMDPVDTATYYCARRANYGNPYYAQDYWGQGTTVTVSSASTKGPSVFPLAPSSKSTSGGTAALGCLVKDYFPEPVTVSWNSGALTSGVHTFPAVLQSSGLYSLSSVVTVPSSSLGTQTYICNVNHKPSNTKVDKKVEPKSCDKTHTCPPCPAPEAAGGPSVFLFPPKPKDTLMISRTPEVTCVVVDVSHEDPEVKFNWYVDGVEVHNAKTKPREEQYNSTYRVVSVLTVLHQDWLNGKEYKCKVSNKALAAPIEKTISKAKGQPREPQVYTLPPSRDELTKNQVSLTCLVKGFYPSDIAVEWESNGQPENNYKTTPPVLDSDGSFFLYSKLTVDKSRWQQGNVFSCSVMHEALHNHYTQKSLSLSPGK

SEQ ID NO: 306 - protein, 219 aa, Artificial Sequence; identical to SEQ ID NO: 276
  Made in Lab - exemplary light chain sequence

SEQ ID NO: 307 - protein, 453 aa, Artificial Sequence
  Made in Lab - exemplary heavy chain sequence
QVTLKESGPALVKPTQTLTLTCTFSGFSLSTPGMGVWWIRQPPGEGLEWLADIWWDDNKYTNPSLKSRLTISKDTSKNQVVLTMTNMDPVDTATYYCARRANYGNPYYAQDYWGQGTTVTVSSASTKGPSVFPLAPSSKSTSGGTAALGCLVKDYFPEPVTVSWNSGALTSGVHTFPAVLQSSGLYSLSSVVTVPSSSLGTQTYICNVNHKPSNTKVDKKVEPKSCDKTHTCPPCPAPEAAGGPSVFLFPPKPKDTLMISRTPEVTCVVVDVSHEDPEVKFNWYVDGVEVHNAKTKPREEQYNSTYRVVSVLTVLHQDWLNGKEYKCKVSNKALAAPIEKTISKAKGQPREPQVYTLPPSRDELTKNQVSLTCLVKGFYPSDIAVEWESNGQPENNYKTTPPVLDSDGSFFLYSKLTVDKSRWQQGNVFSCSVMHEALHNHYTQKSLSLSPGK

SEQ ID NO: 308 - protein, 219 aa, Artificial Sequence; identical to SEQ ID NO: 276
  Made in Lab - exemplary light chain sequence

SEQ ID NO: 309 - protein, 453 aa, Artificial Sequence
  Made in Lab - exemplary heavy chain sequence
QVTLKESGPALVKPTQTLTLTCTFSGFSLSTPGMGVWWIRQPSGEGLEWLADIWWDDNKYTNPSLKSRLTISKDTSKNQVVLTMTNMDPVDTATYYCARRANYGNPYYAQDYWGQGTTVTVSSASTKGPSVFPLAPSSKSTSGGTAALGCLVKDYFPEPVTVSWNSGALTSGVHTFPAVLQSSGLYSLSSVVTVPSSSLGTQTYICNVNHKPSNTKVDKKVEPKSCDKTHTCPPCPAPEAAGGPSVFLFPPKPKDTLMISRTPEVTCVVVDVSHEDPEVKFNWYVDGVEVHNAKTKPREEQYNSTYRVVSVLTVLHQDWLNGKEYKCKVSNKALAAPIEKTISKAKGQPREPQVYTLPPSRDELTKNQVSLTCLVKGFYPSDIAVEWESNGQPENNYKTTPPVLDSDGSFFLYSKLTVDKSRWQQGNVFSCSVMHEALHNHYTQKSLSLSPGK

SEQ ID NO: 310 - protein, 219 aa, Artificial Sequence; identical to SEQ ID NO: 276
  Made in Lab - exemplary light chain sequence

SEQ ID NO: 311 - protein, 453 aa, Artificial Sequence; identical to SEQ ID NO: 271
  Made in Lab - exemplary heavy chain sequence

SEQ ID NO: 312 - protein, 219 aa, Artificial Sequence
  Made in Lab - exemplary light chain sequence
DIVMTQTPLSLPVTPGEPASISCRSSQSIVHSSGNTYLEWYLQKPGQSPQLLIYKVSNRFSGVPDRFSGSGSGTDFTLKISRVEAEDVGVYYCFQGSHVPWTFGQGTKVEIKRTVAAPSVFIFPPSDEQLKSGTASVVCLLNNFYPREAKVQWKVDNALQSGNSQESVTEQDSKDSTYSLSSTLTLSKADYEKHKVYACEVTHQGLSSPVTKSFNRGEC

SEQ ID NO: 313 - protein, 453 aa, Artificial Sequence; identical to SEQ ID NO: 271
  Made in Lab - exemplary heavy chain sequence

SEQ ID NO: 314 - protein, 219 aa, Artificial Sequence
  Made in Lab - exemplary light chain sequence
DIVMTQTPLSLPVTPGEPASISCRSSQSIVHSNANTYLEWYLQKPGQSPQLLIYKVSNRFSGVPDRFSGSGSGTDFTLKISRVEAEDVGVYYCFQGSHVPWTFGQGTKVEIKRTVAAPSVFIFPPSDEQLKSGTASVVCLLNNFYPREAKVQWKVDNALQSGNSQESVTEQDSKDSTYSLSSTLTLSKADYEKHKVYACEVTHQGLSSPVTKSFNRGEC

SEQ ID NO: 315 - protein, 453 aa, Artificial Sequence; identical to SEQ ID NO: 277
  Made in Lab - exemplary heavy chain sequence

SEQ ID NO: 316 - protein, 219 aa, Artificial Sequence; identical to SEQ ID NO: 312
  Made in Lab - exemplary light chain sequence

SEQ ID NO: 317 - protein, 453 aa, Artificial Sequence; identical to SEQ ID NO: 277
  Made in Lab - exemplary heavy chain sequence

SEQ ID NO: 318 - protein, 219 aa, Artificial Sequence; identical to SEQ ID NO: 314
  Made in Lab - exemplary light chain sequence

SEQ ID NO: 319 - protein, 450 aa, Artificial Sequence
  Made in Lab - exemplary heavy chain sequence
EVQLVESGGGLVQPGGSLRLSCAASGFDFSRYWMTWVRQAPGKGLEWVAEINPDSSTANYTPYLKDRFTISRDNAKNSLYLQMNSLRAEDTAVYYCARPVDGYYDAMDPWGQGTTVTVSSASTKGPSVFPLAPSSKSTSGGTAALGCLVKDYFPEPVTVSWNSGALTSGVHTFPAVLQSSGLYSLSSVVTVPSSSLGTQTYICNVNHKPSNTKVDKKVEPKSCDKTHTCPPCPAPEAAGGPSVFLFPPKPKDTLMISRTPEVTCVVVDVSHEDPEVKFNWYVDGVEVHNAKTKPREEQYNSTYRVVSVLTVLHQDWLNGKEYKCKVSNKALAAPIEKTISKAKGQPREPQVYTLPPSRDELTKNQVSLTCLVKGFYPSDIAVEWESNGQPENNYKTTPPVLDSDGSFFLYSKLTVDKSRWQQGNVFSCSVMHEALHNHYTQKSLSLSPGK

SEQ ID NO: 320 - protein, 220 aa, Artificial Sequence
  Made in Lab - exemplary light chain sequence
DIVMTQSPDSLAVSLGERATINCKSSQSLLNWYNQKNYLAWYQQKPGQPPKLLIYGASTRESGVPDRFSGSGSGTDFTLTISSLQAEDVAVYYCQNDHQYPYTFGQGTKLEIKRTVAAPSVFIFPPSDEQLKSGTASVVCLLNNFYPREAKVQWKVDNALQSGNSQESVTEQDSKDSTYSLSSTLTLSKADYEKHKVYACEVTHQGLSSPVTKSFNRGEC

SEQ ID NO: 321 - protein, 450 aa, Artificial Sequence
  Made in Lab - exemplary heavy chain sequence
EVQLVESGGGLVQPGGSLRLSCAASGFTFSRYWMTWVRQAPGKGLEWVAEINPDSSTANYTPYLKDRFTISRDNAKNSLYLQMNSLRAEDTAVYYCARPVDGYYDAMDPWGQGTTVTVSSASTKGPSVFPLAPSSKSTSGGTAALGCLVKDYFPEPVTVSWNSGALTSGVHTFPAVLQSSGLYSLSSVVTVPSSSLGTQTYICNVNHKPSNTKVDKKVEPKSCDKTHTCPPCPAPEAAGGPSVFLFPPKPKDTLMISRTPEVTCVVVDVSHEDPEVKFNWYVDGVEVHNAKTKPREEQYNSTYRVVSVLTVLHQDWLNGKEYKCKVSNKALAAPIEKTISKAKGQPREPQVYTLPPSRDELTKNQVSLTCLVKGFYPSDIAVEWESNGQPENNYKTTPPVLDSDGSFFLYSKLTVDKSRWQQGNVFSCSVMHEALHNHYTQKSLSLSPGK

SEQ ID NO: 322 - protein, 220 aa, Artificial Sequence; identical to SEQ ID NO: 320
  Made in Lab - exemplary light chain sequence

SEQ ID NO: 323 - protein, 450 aa, Artificial Sequence
  Made in Lab - exemplary heavy chain sequence
EVQLVESGGGLVQPGGSLRLSCAASGFTFSRYWMTWVRQAPGKGLEWIGEINPDSSTANYTPYLKDRFTISRDNAKNSLYLQMNSLRAEDTAVYYCARPVDGYYDAMDPWGQGTTVTVSSASTKGPSVFPLAPSSKSTSGGTAALGCLVKDYFPEPVTVSWNSGALTSGVHTFPAVLQSSGLYSLSSVVTVPSSSLGTQTYICNVNHKPSNTKVDKKVEPKSCDKTHTCPPCPAPEAAGGPSVFLFPPKPKDTLMISRTPEVTCVVVDVSHEDPEVKFNWYVDGVEVHNAKTKPREEQYNSTYRVVSVLTVLHQDWLNGKEYKCKVSNKALAAPIEKTISKAKGQPREPQVYTLPPSRDELTKNQVSLTCLVKGFYPSDIAVEWESNGQPENNYKTTPPVLDSDGSFFLYSKLTVDKSRWQQGNVFSCSVMHEALHNHYTQKSLSLSPGK

SEQ ID NO: 324 - protein, 220 aa, Artificial Sequence; identical to SEQ ID NO: 320
  Made in Lab - exemplary light chain sequence

SEQ ID NO: 325 - protein, 450 aa, Artificial Sequence
  Made in Lab - exemplary heavy chain sequence
EVQLVESGGGLVQPGGSLRLSCAASGFDFSRYWMTWVRQAPGKGLEWIGEINPDSSTANYTPYLKDRFTISRDNAKNSLYLQMNSLRAEDTAVYYCARPVDGYYDAMDPWGQGTTVTVSSASTKGPSVFPLAPSSKSTSGGTAALGCLVKDYFPEPVTVSWNSGALTSGVHTFPAVLQSSGLYSLSSVVTVPSSSLGTQTYICNVNHKPSNTKVDKKVEPKSCDKTHTCPPCPAPEAAGGPSVFLFPPKPKDTLMISRTPEVTCVVVDVSHEDPEVKFNWYVDGVEVHNAKTKPREEQYNSTYRVVSVLTVLHQDWLNGKEYKCKVSNKALAAPIEKTISKAKGQPREPQVYTLPPSRDELTKNQVSLTCLVKGFYPSDIAVEWESNGQPENNYKTTPPVLDSDGSFFLYSKLTVDKSRWQQGNVFSCSVMHEALHNHYTQKSLSLSPGK

SEQ ID NO: 326 - protein, 220 aa, Artificial Sequence; identical to SEQ ID NO: 320
  Made in Lab - exemplary light chain sequence

SEQ ID NO: 327 - protein, 450 aa, Artificial Sequence
  Made in Lab - exemplary heavy chain sequence
EVQLVESGGGLVQPGGSLRLSCAASGFTFSRYWMTWVRQAPGKGLEWIGEINPDSSTANYTPYLKGRFTISRDNAKNSLYLQMNSLRAEDTAVYYCARPVDGYYDAMDPWGQGTTVTVSSASTKGPSVFPLAPSSKSTSGGTAALGCLVKDYFPEPVTVSWNSGALTSGVHTFPAVLQSSGLYSLSSVVTVPSSSLGTQTYICNVNHKPSNTKVDKKVEPKSCDKTHTCPPCPAPEAAGGPSVFLFPPKPKDTLMISRTPEVTCVVVDVSHEDPEVKFNWYVDGVEVHNAKTKPREEQYNSTYRVVSVLTVLHQDWLNGKEYKCKVSNKALAAPIEKTISKAKGQPREPQVYTLPPSRDELTKNQVSLTCLVKGFYPSDIAVEWESNGQPENNYKTTPPVLDSDGSFFLYSKLTVDKSRWQQGNVFSCSVMHEALHNHYTQKSLSLSPGK

SEQ ID NO: 328 - protein, 220 aa, Artificial Sequence; identical to SEQ ID NO: 320
  Made in Lab - exemplary light chain sequence

SEQ ID NO: 329 - protein, 450 aa, Artificial Sequence
  Made in Lab - exemplary heavy chain sequence
EVQLVESGGGLVQPGGSLRLSCAASGFTFSRYWMTWVRQAPGKGLEWIGEINPDASTANYTPYLKGRFTISRDNAKNSLYLQMNSLRAEDTAVYYCARPVDGYYDAMDPWGQGTTVTVSSASTKGPSVFPLAPSSKSTSGGTAALGCLVKDYFPEPVTVSWNSGALTSGVHTFPAVLQSSGLYSLSSVVTVPSSSLGTQTYICNVNHKPSNTKVDKKVEPKSCDKTHTCPPCPAPELLGGPSVFLFPPKPKDTLMISRTPEVTCVVVDVSHEDPEVKFNWYVDGVEVHNAKTKPREEQYNSTYRVVSVLTVLHQDWLNGKEYKCKVSNKALPAPIEKTISKAKGQPREPQVYTLPPSRDELTKNQVSLTCLVKGFYPSDIAVEWESNGQPENNYKTTPPVLDSDGSFFLYSKLTVDKSRWQQGNVFSCSVMHEALHNHYTQKSLSLSPGK

SEQ ID NO: 330 - protein, 220 aa, Artificial Sequence; identical to SEQ ID NO: 320
  Made in Lab - exemplary light chain sequence

SEQ ID NO: 331 - protein, 450 aa, Artificial Sequence
  Made in Lab - exemplary heavy chain sequence
EVQLVESGGGLVQPGGSLRLSCAASGFTFSRYWMTWVRQAPGKGLEWIGEINPDSSTANYTPYLKGRFTISRDNAKNSLYLQMNSLRAEDTAVYYCARPVDAYYDAMDPWGQGTTVTVSSASTKGPSVFPLAPSSKSTSGGTAALGCLVKDYFPEPVTVSWNSGALTSGVHTFPAVLQSSGLYSLSSVVTVPSSSLGTQTYICNVNHKPSNTKVDKKVEPKSCDKTHTCPPCPAPELLGGPSVFLFPPKPKDTLMISRTPEVTCVVVDVSHEDPEVKFNWYVDGVEVHNAKTKPREEQYNSTYRVVSVLTVLHQDWLNGKEYKCKVSNKALPAPIEKTISKAKGQPREPQVYTLPPSRDELTKNQVSLTCLVKGFYPSDIAVEWESNGQPENNYKTTPPVLDSDGSFFLYSKLTVDKSRWQQGNVFSCSVMHEALHNHYTQKSLSLSPGK

SEQ ID NO: 332 - protein, 220 aa, Artificial Sequence; identical to SEQ ID NO: 320
  Made in Lab - exemplary light chain sequence

SEQ ID NO: 333 - protein, 450 aa, Artificial Sequence
  Made in Lab - exemplary heavy chain sequence
EVQLVESGGGLVQPGGSLRLSCAASGFTFSRYWMTWVRQAPGKGLEWIGEINPDASTANYTPYLKGRFTISRDNAKNSLYLQMNSLRAEDTAVYYCARPVDAYYDAMDPWGQGTTVTVSSASTKGPSVFPLAPSSKSTSGGTAALGCLVKDYFPEPVTVSWNSGALTSGVHTFPAVLQSSGLYSLSSVVTVPSSSLGTQTYICNVNHKPSNTKVDKKVEPKSCDKTHTCPPCPAPELLGGPSVFLFPPKPKDTLMISRTPEVTCVVVDVSHEDPEVKFNWYVDGVEVHNAKTKPREEQYNSTYRVVSVLTVLHQDWLNGKEYKCKVSNKALPAPIEKTISKAKGQPREPQVYTLPPSRDELTKNQVSLTCLVKGFYPSDIAVEWESNGQPENNYKTTPPVLDSDGSFFLYSKLTVDKSRWQQGNVFSCSVMHEALHNHYTQKSLSLSPGK

SEQ ID NO: 334 - protein, 220 aa, Artificial Sequence; identical to SEQ ID NO: 320
  Made in Lab - exemplary light chain sequence

SEQ ID NO: 335 - protein, 450 aa, Artificial Sequence
  Made in Lab - exemplary heavy chain sequence
EVQLVESGGGLVQPGGSLRLSCAASGFTFSRYWMTWVRQAPGKGLEWVAEINPDSSTANYTPYLKDRFTISRDNAKNSLYLQMNSLRAEDTAVYYCARPVDGYYDAMDYWGQGTTVTVSSASTKGPSVFPLAPSSKSTSGGTAALGCLVKDYFPEPVTVSWNSGALTSGVHTFPAVLQSSGLYSLSSVVTVPSSSLGTQTYICNVNHKPSNTKVDKKVEPKSCDKTHTCPPCPAPELLGGPSVFLFPPKPKDTLMISRTPEVTCVVVDVSHEDPEVKFNWYVDGVEVHNAKTKPREEQYNSTYRVVSVLTVLHQDWLNGKEYKCKVSNKALPAPIEKTISKAKGQPREPQVYTLPPSRDELTKNQVSLTCLVKGFYPSDIAVEWESNGQPENNYKTTPPVLDSDGSFFLYSKLTVDKSRWQQGNVFSCSVMHEALHNHYTQKSLSLSPGK

SEQ ID NO: 336 - protein, 220 aa, Artificial Sequence; identical to SEQ ID NO: 320
  Made in Lab - exemplary light chain sequence

SEQ ID NO: 337 - protein, 450 aa, Artificial Sequence
  Made in Lab - exemplary heavy chain sequence
EVQLVESGGGLVQPGGSLRLSCAASGFTFSRYWMTWVRQAPGKGLEWVAEINPDSSTANYTPYLKDRFTISRDNAKNSLYLQMNSLRAEDTAVYYCARPVDGYYDAMDNWGQGTTVTVSSASTKGPSVFPLAPSSKSTSGGTAALGCLVKDYFPEPVTVSWNSGALTSGVHTFPAVLQSSGLYSLSSVVTVPSSSLGTQTYICNVNHKPSNTKVDKKVEPKSCDKTHTCPPCPAPELLGGPSVFLFPPKPKDTLMISRTPEVTCVVVDVSHEDPEVKFNWYVDGVEVHNAKTKPREEQYNSTYRVVSVLTVLHQDWLNGKEYKCKVSNKALPAPIEKTISKAKGQPREPQVYTLPPSRDELTKNQVSLTCLVKGFYPSDIAVEWESNGQPENNYKTTPPVLDSDGSFFLYSKLTVDKSRWQQGNVFSCSVMHEALHNHYTQKSLSLSPGK

SEQ ID NO: 338 - protein, 220 aa, Artificial Sequence; identical to SEQ ID NO: 320
  Made in Lab - exemplary light chain sequence

SEQ ID NO: 339 - protein, 450 aa, Artificial Sequence
  Made in Lab - exemplary heavy chain sequence
EVQLVESGGGLVQPGGSLRLSCAASGFTFSRYWMTWVRQAPGKGLEWIGEINPDSSTANYTPYLKGRFTISRDNAKNSLYLQMNSLRAEDTAVYYCARPVDGYYDAMDYWGQGTTVTVSSASTKGPSVFPLAPSSKSTSGGTAALGCLVKDYFPEPVTVSWNSGALTSGVHTFPAVLQSSGLYSLSSVVTVPSSSLGTQTYICNVNHKPSNTKVDKKVEPKSCDKTHTCPPCPAPELLGGPSVFLFPPKPKDTLMISRTPEVTCVVVDVSHEDPEVKFNWYVDGVEVHNAKTKPREEQYNSTYRVVSVLTVLHQDWLNGKEYKCKVSNKALPAPIEKTISKAKGQPREPQVYTLPPSRDELTKNQVSLTCLVKGFYPSDIAVEWESNGQPENNYKTTPPVLDSDGSFFLYSKLTVDKSRWQQGNVFSCSVMHEALHNHYTQKSLSLSPGK

SEQ ID NO: 340 - protein, 220 aa, Artificial Sequence; identical to SEQ ID NO: 320
  Made in Lab - exemplary light chain sequence

SEQ ID NO: 341 - protein, 450 aa, Artificial Sequence
  Made in Lab - exemplary heavy chain sequence
EVQLVESGGGLVQPGGSLRLSCAASGFTFSRYWMTWVRQAPGKGLEWIGEINPDSSTANYTPYLKGRFTISRDNAKNSLYLQMNSLRAEDTAVYYCARPVDGYYDAMDNWGQGTTVTVSSASTKGPSVFPLAPSSKSTSGGTAALGCLVKDYFPEPVTVSWNSGALTSGVHTFPAVLQSSGLYSLSSVVTVPSSSLGTQTYICNVNHKPSNTKVDKKVEPKSCDKTHTCPPCPAPELLGGPSVFLFPPKPKDTLMISRTPEVTCVVVDVSHEDPEVKFNWYVDGVEVHNAKTKPREEQYNSTYRVVSVLTVLHQDWLNGKEYKCKVSNKALPAPIEKTISKAKGQPREPQVYTLPPSRDELTKNQVSLTCLVKGFYPSDIAVEWESNGQPENNYKTTPPVLDSDGSFFLYSKLTVDKSRWQQGNVFSCSVMHEALHNHYTQKSLSLSPGK

SEQ ID NO: 342 - protein, 220 aa, Artificial Sequence; identical to SEQ ID NO: 320
  Made in Lab - exemplary light chain sequence

SEQ ID NO: 343 - protein, 450 aa, Artificial Sequence; identical to SEQ ID NO: 329
  Made in Lab - exemplary heavy chain sequence

SEQ ID NO: 344 - protein, 220 aa, Artificial Sequence
  Made in Lab - exemplary light chain sequence
DIVMTQSPDSLAVSLGERATINCKSSQSLLNRYNQKNYLAWYQQKPGQPPKLLIYGASTRESGVPDRFSGSGSGTDFTLTISSLQAEDVAVYYCQNDHQYPYTFGQGTKLEIKRTVAAPSVFIFPPSDEQLKSGTASVVCLLNNFYPREAKVQWKVDNALQSGNSQESVTEQDSKDSTYSLSSTLTLSKADYEKHKVYACEVTHQGLSSPVTKSFNRGEC

SEQ ID NO: 345 - protein, 450 aa, Artificial Sequence; identical to SEQ ID NO: 331
  Made in Lab - exemplary heavy chain sequence

SEQ ID NO: 346 - protein, 220 aa, Artificial Sequence; identical to SEQ ID NO: 344
  Made in Lab - exemplary light chain sequence

SEQ ID NO: 347 - protein, 450 aa, Artificial Sequence; identical to SEQ ID NO: 333
  Made in Lab - exemplary heavy chain sequence

SEQ ID NO: 348 - protein, 220 aa, Artificial Sequence; identical to SEQ ID NO: 344
  Made in Lab - exemplary light chain sequence

SEQ ID NO: 349 - protein, 450 aa, Artificial Sequence; identical to SEQ ID NO: 335
  Made in Lab - exemplary heavy chain sequence

SEQ ID NO: 350 - protein, 220 aa, Artificial Sequence; identical to SEQ ID NO: 344
  Made in Lab - exemplary light chain sequence

SEQ ID NO: 351 - protein, 450 aa, Artificial Sequence; identical to SEQ ID NO: 337
  Made in Lab - exemplary heavy chain sequence

SEQ ID NO: 352 - protein, 220 aa, Artificial Sequence; identical to SEQ ID NO: 344
  Made in Lab - exemplary light chain sequence

SEQ ID NO: 353 - protein, 450 aa, Artificial Sequence; identical to SEQ ID NO: 339
  Made in Lab - exemplary heavy chain sequence

SEQ ID NO: 354 - protein, 220 aa, Artificial Sequence; identical to SEQ ID NO: 344
  Made in Lab - exemplary light chain sequence

SEQ ID NO: 355 - protein, 450 aa, Artificial Sequence; identical to SEQ ID NO: 341
  Made in Lab - exemplary heavy chain sequence

SEQ ID NO: 356 - protein, 220 aa, Artificial Sequence; identical to SEQ ID NO: 344
  Made in Lab - exemplary light chain sequence

SEQ ID NO: 357 - protein, 30 aa, Artificial Sequence
  Made in Lab - HU177 heavy chain framework 1 sequence
QVTLKESGPALVKPTQTLTLTCTFSGFSLS

SEQ ID NO: 358 - protein, 30 aa, Artificial Sequence
  Made in Lab - HU177 heavy chain framework 1 sequence
EVQLVESGGGLVQPGGSLRLSCAASGFTFS

SEQ ID NO: 359 - protein, 30 aa, Artificial Sequence
  Made in Lab - HU177 heavy chain framework 1 sequence
EVQLVESGGGLVQPGGSLRLSCAASGFSFS

SEQ ID NO: 360 - protein, 30 aa, Artificial Sequence
  Made in Lab - HU177 heavy chain framework 1 sequence
EVQLVESGGGLVQPGGSLRLSCAASGFTLS

SEQ ID NO: 361 - protein, 30 aa, Artificial Sequence
  Made in Lab - HU177 heavy chain framework 1 sequence
EVQLVESGGGLVQPGGSLRLSCAASGFSLS

SEQ ID NO: 362 - protein, 14 aa, Artificial Sequence
  Made in Lab - HU177 heavy chain framework 2 sequence
WIRQPPGKALEWLA

SEQ ID NO: 363 - protein, 14 aa, Artificial Sequence
  Made in Lab - HU177 heavy chain framework 2 sequence
WVRQAPGKGLEWVA

SEQ ID NO: 364 - protein, 14 aa, Artificial Sequence
  Made in Lab - HU177 heavy chain framework 2 sequence
WIRQAPGKGLEWVA

SEQ ID NO: 365 - protein, 14 aa, Artificial Sequence
  Made in Lab - HU177 heavy chain framework 2 sequence
WVRQAPGKGLEWLA

SEQ ID NO: 366 - protein, 14 aa, Artificial Sequence
  Made in Lab - HU177 heavy chain framework 2 sequence
WIRQAPGKGLEWLA

SEQ ID NO: 367 - protein, 32 aa, Artificial Sequence
  Made in Lab - HU177 heavy chain framework 3 sequence
RLTISKDTSKNQVVLTMTNMDPVDTATYYCAR

SEQ ID NO: 368 - protein, 32 aa, Artificial Sequence
  Made in Lab - HU177 heavy chain framework 3 sequence
RLTISRDNAKNSLYLQMNSLRAEDTAVYYCAR

SEQ ID NO: 369 - protein, 32 aa, Artificial Sequence
  Made in Lab - HU177 heavy chain framework 3 sequence
RLTISKDNAKNSLYLQMNSLRAEDTAVYYCAR

SEQ ID NO: 370 - protein, 11 aa, Artificial Sequence
  Made in Lab - HU177 heavy chain framework 4 sequence
WGQGTTVTVSS

SEQ ID NO: 371 - protein, 7 aa, Artificial Sequence
  Made in Lab - HU177 Heavy CDR1
TSGMGVG

SEQ ID NO: 372 - protein, 7 aa, Artificial Sequence
  Made in Lab - HU177 Heavy CDR1
TPGMGVW

SEQ ID NO: 373 - protein, 16 aa, Artificial Sequence
  Made in Lab - HU177 Heavy CDR2
DIWWDDNKYANPSLKS

SEQ ID NO: 374 - protein, 16 aa, Artificial Sequence
  Made in Lab - HU177 Heavy CDR2
DIWWDDNKYTNPSLKS

SEQ ID NO: 375 - protein, 13 aa, Artificial Sequence
  Made in Lab - HU177 Heavy CDR3
RANYGNPYYAQDY

SEQ ID NO: 376 - protein, 23 aa, Artificial Sequence
  Made in Lab - HU177 light chain framework 1 sequence
DIVMTQTPLSLPVTPGEPASISC

SEQ ID NO: 377 - protein, 15 aa, Artificial Sequence
  Made in Lab - HU177 light chain framework 2 sequence
WYLQKPGQSPQLLIY

SEQ ID NO: 378 - protein, 32 aa, Artificial Sequence
  Made in Lab - HU177 light chain framework 3 sequence
GVPDRFSGSGSGTDFTLKISRVEAEDVGVYYC

SEQ ID NO: 379 - protein, 10 aa, Artificial Sequence
  Made in Lab - HU177 light chain framework 4 sequence
FGQGTKVEIK

SEQ ID NO: 380 - protein, 16 aa, Artificial Sequence
  Made in Lab - HU177 Light CDR1
RSSQSIVHSNGNTYLE

SEQ ID NO: 381 - protein, 16 aa, Artificial Sequence
  Made in Lab - HU177 Light CDR1
RSSQSIVHSQGNTYLE

SEQ ID NO: 382 - protein, 16 aa, Artificial Sequence
  Made in Lab - HU177 Light CDR1
RSSQSIVHSSGNTYLE

SEQ ID NO: 383 - protein, 16 aa, Artificial Sequence
  Made in Lab - HU177 Light CDR1
RSSQSIVHSNANTYLE

SEQ ID NO: 384 - protein, 16 aa, Artificial Sequence
  Made in Lab - HU177 Light CDR1
RSSQSIVHSWGNTYLE

SEQ ID NO: 385 - protein, 16 aa, Artificial Sequence
  Made in Lab - HU177 Light CDR1
RSSQSIVHSWGNTYFE

SEQ ID NO: 386 - protein, 7 aa, Artificial Sequence
  Made in Lab - HU177 Light CDR2
KVSNRFS

SEQ ID NO: 387 - protein, 9 aa, Artificial Sequence
  Made in Lab - HU177 Light CDR3
FQGSHVPWT

SEQ ID NO: 388 - protein, 9 aa, Artificial Sequence
  Made in Lab - HU177 Light CDR3
FQGSHFPWT

SEQ ID NO: 389 - protein, 30 aa, Artificial Sequence; identical to SEQ ID NO: 358
  Made in Lab - HUIV26 heavy chain framework 1 sequence

SEQ ID NO: 390 - protein, 30 aa, Artificial Sequence
  Made in Lab - HUIV26 heavy chain framework 1 sequence
EVQLVESGGGLVQPGGSLRLSCAASGFDFS

SEQ ID NO: 391 - protein, 14 aa, Artificial Sequence
  Made in Lab - HUIV26 heavy chain framework 2 sequence
WVRQAPGKGLEWVA

SEQ ID NO: 392 - protein, 14 aa, Artificial Sequence
  Made in Lab - HUIV26 heavy chain framework 2 sequence
WVRQAPGKGLEWIG

SEQ ID NO: 393 - protein, 32 aa, Artificial Sequence
  Made in Lab - HUIV26 heavy chain framework 3 sequence
RFTISRDNAKNSLYLQMNSLRAEDTAVYYCAR

SEQ ID NO: 394 - protein, 11 aa, Artificial Sequence
  Made in Lab - HUIV26 heavy chain framework 4 sequence
WGQGTTVTVSS

SEQ ID NO: 395 - protein, 5 aa, Artificial Sequence
  Made in Lab - HUIV26 Heavy CDR1
RYWMS

SEQ ID NO: 396 - protein, 5 aa, Artificial Sequence
  Made in Lab - HUIV26 Heavy CDR1
RYWMA

SEQ ID NO: 397 - protein, 5 aa, Artificial Sequence
  Made in Lab - HUIV26 Heavy CDR1
RYWMT

SEQ ID NO: 398 - protein, 17 aa, Artificial Sequence
  Made in Lab - HUIV26 Heavy CDR2
EINPDSSTANYTPALKG

SEQ ID NO: 399 - protein, 17 aa, Artificial Sequence
  Made in Lab - HUIV26 Heavy CDR2
EINPDSSTANYTPSLKG

SEQ ID NO: 400 - protein, 17 aa, Artificial Sequence
  Made in Lab - HUIV26 Heavy CDR2
EINPDSSTANYTPYLKG

SEQ ID NO: 401 - protein, 17 aa, Artificial Sequence
  Made in Lab - HUIV26 Heavy CDR2
EINPDASTANYTPYLKG

SEQ ID NO: 402 - protein, 11 aa, Artificial Sequence
  Made in Lab - HUIV26 Heavy CDR3
PVDGYYDAMDP

SEQ ID NO: 403 - protein, 11 aa, Artificial Sequence
  Made in Lab - HUIV26 Heavy CDR3
PVDAYYDAMDP

SEQ ID NO: 404 - protein, 11 aa, Artificial Sequence
  Made in Lab - HUIV26 Heavy CDR3
PVDAYYDAMDP

SEQ ID NO: 405 - protein, 11 aa, Artificial Sequence
  Made in Lab - HUIV26 Heavy CDR3
PVDGYYDAMDN

SEQ ID NO: 406 - protein, 23 aa, Artificial Sequence
  Made in Lab - HUIV26 light chain framework 1 sequence
DIVMTQSPDSLAVSLGERATINC

SEQ ID NO: 407 - protein, 15 aa, Artificial Sequence
  Made in Lab - HUIV26 light chain framework 2 sequence
WYQQKPGQPPKLLIY

SEQ ID NO: 408 - protein, 32 aa, Artificial Sequence
  Made in Lab - HUIV26 light chain framework 3 sequence
GVPDRFSGSGSGTDFTLTISSLQAEDVAVYYC

SEQ ID NO: 409 - protein, 10 aa, Artificial Sequence
  Made in Lab - HUIV26 light chain framework 4 sequence
FGQGTKLEIK

SEQ ID NO: 410 - protein, 17 aa, Artificial Sequence
  Made in Lab - HUIV26 Light CDR1
KSSQSLLNWHNQKNYLA

SEQ ID NO: 411 - protein, 17 aa, Artificial Sequence
  Made in Lab - HUIV26 Light CDR1
KSSQSLLNWYNQKNYLA

SEQ ID NO: 412 - protein, 17 aa, Artificial Sequence
  Made in Lab - HUIV26 Light CDR1
KSSQSLLNRYNQKNYLA

SEQ ID NO: 413 - protein, 7 aa, Artificial Sequence
  Made in Lab - HUIV26 Light CDR2
GASTRES

SEQ ID NO: 414 - protein, 9 aa, Artificial Sequence
  Made in Lab - HUIV26 Light CDR3
QNDHQYPYT

SEQ ID NO: 415 - protein, 1464 aa, Homo sapiens
MFSFVDLRLLLLLAATALLTHGQEEGQVEGQDEDIPPITCVQNGLRYHDRDVWKPEPCRICVCDNGKVLCDDVICDETKNCPGAEVPEGECCPVCPDGSESPTDQETTGVEGPKGDTGPRGPRGPAGPPGRDGIPGQPGLPGPPGPPGPPGPPGLGGNFAPQLSYGYDEKSTGGISVPGPMGPSGPRGLPGPPGAPGPQGFQGPPGEPGEPGASGPMGPRGPPGPPGKNGDDGEAGKPGRPGERGPPGPQGARGLPGTAGLPGMKGHRGFSGLDGAKGDAGPAGPKGEPGSPGENGAPGQMGPRGLPGERGRPGAPGPAGARGNDGATGAAGPPGPTGPAGPPGFPGAVGAKGEAGPQGPRGSEGPQGVRGEPGPPGPAGAAGPAGNPGADGQPGAKGANGAPGIAGAPGFPGARGPSGPQGPGGPPGPKGNSGEPGAPGSKGDTGAKGEPGPVGVQGPPGPAGEEGKRGARGEPGPTGLPGPPGERGGPGSRGFPGADGVAGPKGPAGERGSPGPAGPKGSPGEAGRPGEAGLPGAKGLTGSPGSPGPDGKTGPPGPAGQDGRPGPPGPPGARGQAGVMGFPGPKGAAGEPGKAGERGVPGPPGAVGPAGKDGEAGAQGPPGPAGPAGERGEQGPAGSPGFQGLPGPAGPPGEAGKPGEQGVPGDLGAPGPSGARGERGFPGERGVQGPPGPAGPRGANGAPGNDGAKGDAGAPGAPGSQGAPGLQGMPGERGAAGLPGPKGDRGDAGPKGADGSPGKDGVRGLTGPIGPPGPAGAPGDKGESGPSGPAGPTGARGAPGDRGEPGPPGPAGFAGPPGADGQPGAKGEPGDAGAKGDAGPPGPAGPAGPPGPIGNVGAPGAKGARGSAGPPGATGFPGAAGRVGPPGPSGNAGPPGPPGPAGKEGGKGPRGETGPAGRPGEVGPPGPPGPAGEKGSPGADGPAGAPGTPGPQGIAGQRGVVGLPGQRGERGFPGLPGPSGEPGKQGPSGASGERGPPGPMGPPGLAGPPGESGREGAPGAEGSPGRDGSPGAKGDRGETGPAGPPGAPGAPGAPGPVGPAGKSGDRGETGPAGPTGPVGPVGARGPAGPQGPRGDKGETGEQGDRGIKGHRGFSGLQGPPGPPGSPGEQGPSGASGPAGPRGPPGSAGAPGKDGLNGLPGPIGPPGPRGRTGDAGPVGPPGPPGPPGPPGPPSAGFDFSFLPQPPQEKAHDGGRYYRADDANVVRDRDLEVDTTLKSLSQQIENIRSPEGSRKNPARTCRDLKMCHSDWKSGEYWIDPNQGCNLDAIKVFCNMETGETCVYPTQPSVAQKNWYISKNPKDKRHVWFGESMTDGFQFEYGGQGSDPADVAIQLTFLRLMSTEASQNITYHCKNSVAYMDQQTGNLKKALLLQGSNEIEIRAEGNSRFTYSVTVDGCTSHTGAWGKTVIEYKTTKTSRLPIIDVAPLDVGAPDQEFGFDVGPVCFL

SEQ ID NO: 416 - protein, 1366 aa, Homo sapiens
MLSFVDTRTLLLLAVTLCLATCQSLQEETVRKGPAGDRGPRGERGPPGPPGRDGEDGPTGPPGPPGPPGPPGLGGNFAAQYDGKGVGLGPGPMGLMGPRGPPGAAGAPGPQGFQGPAGEPGEPGQTGPAGARGPAGPPGKAGEDGHPGKPGRPGERGVVGPQGARGFPGTPGLPGFKGIRGHNGLDGLKGQPGAPGVKGEPGAPGENGTPGQTGARGLPGERGRVGAPGPAGARGSDGSVGPVGPAGPIGSAGPPGFPGAPGPKGEIGAVGNAGPAGPAGPRGEVGLPGLSGPVGPPGNPGANGLTGAKGAAGLPGVAGAPGLPGPRGIPGPVGAAGATGARGLVGEPGPAGSKGESGNKGEPGSAGPQGPPGPSGEEGKRGPNGEAGSAGPPGPPGLRGSPGSRGLPGADGRAGVMGPPGSRGASGPAGVRGPNGDAGRPGEPGLMGPRGLPGSPGNIGPAGKEGPVGLPGIDGRPGPIGPAGARGEPGNIGFPGPKGPTGDPGKNGDKGHAGLAGARGAPGPDGNNGAQGPPGPQGVQGGKGEQGPPGPPGFQGLPGPSGPAGEVGKPGERGLHGEFGLPGPAGPRGERGPPGESGAAGPTGPIGSRGPSGPPGPDGNKGEPGVVGAVGTAGPSGPSGLPGERGAAGIPGGKGEKGEPGLRGEIGNPGRDGARGAPGAVGAPGPAGATGDRGEAGAAGPAGPAGPRGSPGERGEVGPAGPNGFAGPAGAAGQPGAKGERGAKGPKGENGVVGPTGPVGAAGPAGPNGPPGPAGSRGDGGPPGMTGFPGAAGRTGPPGPSGISGPPGPPGPAGKEGLRGPRGDQGPVGRTGEVGAVGPPGFAGEKGPSGEAGTAGPPGTPGPQGLLGAPGILGLPGSRGERGLPGVAGAVGEPGPLGIAGPPGARGPPGAVGSPGVNGAPGEAGRDGNPGNDGPPGRDGQPGHKGERGYPGNIGPVGAAGAPGPHGPVGPAGKHGNRGETGPSGPVGPAGAVGPRGPSGPQGIRGDKGEPGEKGPRGLPGLKGHNGLQGLPGIAGHHGDQGAPGSVGPAGPRGPAGPSGPAGKDGRTGHPGTVGPAGIRGPQGHQGPAGPPGPPGPPGPPGVSGGGYDFGYDGDFYRADQPRSAPSLRPKDYEVDATLKSLNNQIETLLTPEGSRKNPARTCRDLRLSHPEWSSGYYWIDPNQGCTMDAIKVYCDFSTGETCIRAQPENIPAKNWYRSSKDKKHVWLGETINAGSQFEYNVEGVTSKEMATQLAFMRLLANYASQNITYHCKNSIAYMDEETGNLKKAVILQGSNDVELVAEGNSRFTYTVLVDGCSKKTNEWGKTIIEYKTNKPSRLPFLDIAPLDIGGADQEFFVDIGPVCFK

SEQ ID NO: 417 - protein, 1487 aa, Homo sapiens
MIRLGAPQTLVLLTLLVAAVLRCQGQDVQEAGSCVQDGQRYNDKDVWKPEPCRICVCDTGTVLCDDIICEDVKDCLSPEIPFGECCPICPTDLATASGQPGPKGQKGEPGDIKDIVGPKGPPGPQGPAGEQGPRGDRGDKGEKGAPGPRGRDGEPGTPGNPGPPGPPGPPGPPGLGGNFAAQMAGGFDEKAGGAQLGVMQGPMGPMGPRGPPGPAGAPGPQGFQGNPGEPGEPGVSGPMGPRGPPGPPGKPGDDGEAGKPGKAGERGPPGPQGARGFPGTPGLPGVKGHRGYPGLDGAKGEAGAPGVKGESGSPGENGSPGPMGPRGLPGERGRTGPAGAAGARGNDGQPGPAGPPGPVGPAGGPGFPGAPGAKGEAGPTGARGPEGAQGPRGEPGTPGSPGPAGASGNPGTDGIPGAKGSAGAPGIAGAPGFPGPRGPPGPQGATGPLGPKGQTGEPGIAGFKGEQGPKGEPGPAGPQGAPGPAGEEGKRGARGEPGGVGPIGPPGERGAPGNRGFPGQDGLAGPKGAPGERGPSGLAGPKGANGDPGRPGEPGLPGARGLTGRPGDAGPQGKVGPSGAPGEDGRPGPPGPQGARGQPGVMGFPGPKGANGEPGKAGEKGLPGAPGLRGLPGKDGETGAAGPPGPAGPAGERGEQGAPGPSGFQGLPGPPGPPGEGGKPGDQGVPGEAGAPGLVGPRGERGFPGERGSPGAQGLQGPRGLPGTPGTDGPKGASGPAGPPGAQGPPGLQGMPGERGAAGIAGPKGDRGDVGEKGPEGAPGKDGGRGLTGPIGPPGPAGANGEKGEVGPPGPAGSAGARGAPGERGETGPPGPAGFAGPPGADGQPGAKGEQGEAGQKGDAGAPGPQGPSGAPGPQGPTGVTGPKGARGAQGPPGATGFPGAAGRVGPPGSNGNPGPPGPPGPSGKDGPKGARGDSGPPGRAGEPGLQGPAGPPGEKGEPGDDGPSGAEGPPGPQGLAGQRGIVGLPGQRGERGFPGLPGPSGEPGKQGAPGASGDRGPPGPVGPPGLTGPAGEPGREGSPGADGPPGRDGAAGVKGDRGETGAVGAPGAPGPPGSPGPAGPTGKQGDRGEAGAQGPMGPSGPAGARGIQGPQGPRGDKGEAGEPGERGLKGHRGFTGLQGLPGPPGPSGDQGASGPAGPSGPRGPPGPVGPSGKDGANGIPGPIGPPGPRGRSGETGPAGPPGNPGPPGPPGPPGPGIDMSAFAGLGPREKGPDPLQYMRADQAAGGLRQHDAEVDATLKSLNNQIESIRSPEGSRKNPARTCRDLKLCHPEWKSGDYWIDPNQGCTLDAMKVFCNMETGETCVYPNPANVPKKNWWSSKSKEKKHIWFGETINGGFHFSYGDDNLAPNTANVQMTFLRLLSTEGSQNITYHCKNSIAYLDEAAGNLKKALLIQGSNDVEIRAEGNSRFTYTALKDGCTKHTGKWGKTVIEYRSQKTSRLPIIDIAPMDIGGPEQEFGVDIGPVCFL

SEQ ID NO: 418 - protein, 1466 aa, Homo sapiens
MMSFVQKGSWLLLALLHPTIILAQQEAVEGGCSHLGQSYADRDVWKPEPCQICVCDSGSVLCDDIICDDQELDCPNPEIPFGECCAVCPQPPTAPTRPPNGQGPQGPKGDPGPPGIPGRNGDPGIPGQPGSPGSPGPPGICESCPTGPQNYSPQYDSYDVKSGVAVGGLAGYPGPAGPPGPPGPPGTSGHPGSPGSPGYQGPPGEPGQAGPSGPPGPPGAIGPSGPAGKDGESGRPGRPGERGLPGPPGIKGPAGIPGFPGMKGHRGFDGRNGEKGETGAPGLKGENGLPGENGAPGPMGPRGAPGERGRPGLPGAAGARGNDGARGSDGQPGPPGPPGTAGFPGSPGAKGEVGPAGSPGSNGAPGQRGEPGPQGHAGAQGPPGPPGINGSPGGKGEMGPAGIPGAPGLMGARGPPGPAGANGAPGLRGGAGEPGKNGAKGEPGPRGERGEAGIPGVPGAKGEDGKDGSPGEPGANGLPGAAGERGAPGFRGPAGPNGIPGEKGPAGERGAPGPAGPRGAAGEPGRDGVPGGPGMRGMPGSPGGPGSDGKPGPPGSQGESGRPGPPGPSGPRGQPGVMGFPGPKGNDGAPGKNGERGGPGGPGPQGPPGKNGETGPQGPPGPTGPGGDKGDTGPPGPQGLQGLPGTGGPPGENGKPGEPGPKGDAGAPGAPGGKGDAGAPGERGPPGLAGAPGLRGGAGPPGPEGGKGAAGPPGPPGAAGTPGLQGMPGERGGLGSPGPKGDKGEPGGPGADGVPGKDGPRGPTGPIGPPGPAGQPGDKGEGGAPGLPGIAGPRGSPGERGETGPPGPAGFPGAPGQNGEPGGKGERGAPGEKGEGGPPGVAGPPGGSGPAGPPGPQGVKGERGSPGGPGAAGFPGARGLPGPPGSNGNPGPPGPSGSPGKDGPPGPAGNTGAPGSPGVSGPKGDAGQPGEKGSPGAQGPPGAPGPLGIAGITGARGLAGPPGMPGPRGSPGPQGVKGESGKPGANGLSGERGPPGPQGLPGLAGTAGEPGRDGNPGSDGLPGRDGSPGGKGDRGENGSPGAPGAPGHPGPPGPVGPAGKSGDRGESGPAGPAGAPGPAGSRGAPGPQGPRGDKGETGERGAAGIKGHRGFPGNPGAPGSPGPAGQQGAIGSPGPAGPRGPVGPSGPPGKDGTSGHPGPIGPPGPRGNRGERGSEGSPGHPGQPGPPGPPGAPGPCCGGVGAAAIAGIGGEKAGGFAPYYGDEPMDFKINTDEIMTSLKSVNGQIESLISPDGSRKNPARNCRDLKFCHPELKSGEYWVDPNQGCKLDAIKVFCNMETGETCISANPLNVPRKHWWTDSSAEKKHVWFGESMDGGFQFSYGNPELPEDVLDVHLAFLRLLSSRASQNITYHCKNSIAYMDQASGNVKKALKLMGSNEGEFKAEGNSKFTYTVLEDGCTKHTGEWSKTVFEYRTRKAVRLPIVDIAPYDIGGPDQEFGVDVGPVCFL

SEQ ID NO: 419 - protein, 1669 aa, Homo sapiens
MGPRLSVWLLLLPAALLLHEEHSRAAAKGGCAGSGCGKCDCHGVKGQKGERGLPGLQGVIGFPGMQGPEGPQGPPGQKGDTGEPGLPGTKGTRGPPGASGYPGNPGLPGIPGQDGPPGPPGIPGCNGTKGERGPLGPPGLPGFAGNPGPPGLPGMKGDPGEILGHVPGMLLKGERGFPGIPGTPGPPGLPGLQGPVGPPGFTGPPGPPGPPGPPGEKGQMGLSFQGPKGDKGDQGVSGPPGVPGQAQVQEKGDFATKGEKGQKGEPGFQGMPGVGEKGEPGKPGPRGKPGKDGDKGEKGSPGFPGEPGYPGLIGRQGPQGEKGEAGPPGPPGIVIGTGPLGEKGERGYPGTPGPRGEPGPKGFPGLPGQPGPPGLPVPGQAGAPGFPGERGEKGDRGFPGTSLPGPSGRDGLPGPPGSPGPPGQPGYTNGIVECQPGPPGDQGPPGIPGQPGFIGEIGEKGQKGESCLICDIDGYRGPPGPQGPPGEIGFPGQPGAKGDRGLPGRDGVAGVPGPQGTPGLIGQPGAKGEPGEFYFDLRLKGDKGDPGFPGQPGMPGRAGSPGRDGHPGLPGPKGSPGSVGLKGERGPPGGVGFPGSRGDTGPPGPPGYGPAGPIGDKGQAGFPGGPGSPGLPGPKGEPGKIVPLPGPPGAEGLPGSPGFPGPQGDRGFPGTPGRPGLPGEKGAVGQPGIGFPGPPGPKGVDGLPGDMGPPGTPGRPGFNGLPGNPGVQGQKGEPGVGLPGLKGLPGLPGIPGTPGEKGSIGVPGVPGEHGAIGPPGLQGIRGEPGPPGLPGSVGSPGVPGIGPPGARGPPGGQGPPGLSGPPGIKGEKGFPGFPGLDMPGPKGDKGAQGLPGITGQSGLPGLPGQQGAPGIPGFPGSKGEMGVMGTPGQPGSPGPVGAPGLPGEKGDHGFPGSSGPRGDPGLKGDKGDVGLPGKPGSMDKVDMGSMKGQKGDQGEKGQIGPIGEKGSRGDPGTPGVPGKDGQAGQPGQPGPKGDPGISGTPGAPGLPGPKGSVGGMGLPGTPGEKGVPGIPGPQGSPGLPGDKGAKGEKGQAGPPGIGIPGLRGEKGDQGIAGFPGSPGEKGEKGSIGIPGMPGSPGLKGSPGSVGYPGSPGLPGEKGDKGLPGLDGIPGVKGEAGLPGTPGPTGPAGQKGEPGSDGIPGSAGEKGEPGLPGRGFPGFPGAKGDKGSKGEVGFPGLAGSPGIPGSKGEQGFMGPPGPQGQPGLPGSPGHATEGPKGDRGPQGQPGLPGLPGPMGPPGLPGIDGVKGDKGNPGWPGAPGVPGPKGDPGFQGMPGIGGSPGITGSKGDMGPPGVPGFQGPKGLPGLQGIKGDQGDQGVPGAKGLPGPPGPPGPYDIIKGEPGLPGPEGPPGLKGLQGLPGPKGQQGVTGLVGIPGPPGIPGFDGAPGQKGEMGPAGPTGPRGFPGPPGPDGLPGSMGPPGTPSVDHGFLVTRHSQTIDDPQCPSGTKILYHGYSLLYVQGNERAHGQDLGTAGSCLRKFSTMPFLFCNINNVCNFASRNDYSYWLSTPEPMPMSMAPITGENIRPFISRCAVCEAPAMVMAVHSQTIQIPPCPSGWSSLWIGYSFVMHTSAGAEGSGQALASPGSCLEEFRSAPFIECHGRGTCNYYANAYSFWLATIERSEMFKKPTPSTLKAGELRTHVSRCQVCMRRT

SEQ ID NO: 420 - protein, 1712 aa, Homo sapiens
MGRDQRAVAGPALRRWLLLGTVTVGFLAQSVLAGVKKFDVPCGGRDCSGGCQCYPEKGGRGQPGPVGPQGYNGPPGLQGFPGLQGRKGDKGERGAPGVTGPKGDVGARGVSGFPGADGIPGHPGQGGPRGRPGYDGCNGTQGDSGPQGPPGSEGFTGPPGPQGPKGQKGEPYALPKEERDRYRGEPGEPGLVGFQGPPGRPGHVGQMGPVGAPGRPGPPGPPGPKGQQGNRGLGFYGVKGEKGDVGQPGPNGIPSDTLHPIIAPTGVTFHPDQYKGEKGSEGEPGIRGISLKGEEGIMGFPGLRGYPGLSGEKGSPGQKGSRGLDGYQGPDGPRGPKGEAGDPGPPGLPAYSPHPSLAKGARGDPGFPGAQGEPGSQGEPGDPGLPGPPGLSIGDGDQRRGLPGEMGPKGFIGDPGIPALYGGPPGPDGKRGPPGPPGLPGPPGPDGFLFGLKGAKGRAGFPGLPGSPGARGPKGWKGDAGECRCTEGDEAIKGLPGLPGPKGFAGINGEPGRKGDRGDPGQHGLPGFPGLKGVPGNIGAPGPKGAKGDSRTITTKGERGQPGVPGVPGMKGDDGSPGRDGLDGFPGLPGPPGDGIKGPPGDPGYPGIPGTKGTPGEMGPPGLGLPGLKGQRGFPGDAGLPGPPGFLGPPGPAGTPGQIDCDTDVKRAVGGDRQEAIQPGCIGGPKGLPGLPGPPGPTGAKGLRGIPGFAGADGGPGPRGLPGDAGREGFPGPPGFIGPRGSKGAVGLPGPDGSPGPIGLPGPDGPPGERGLPGEVLGAQPGPRGDAGVPGQPGLKGLPGDRGPPGFRGSQGMPGMPGLKGQPGLPGPSGQPGLYGPPGLHGFPGAPGQEGPLGLPGIPGREGLPGDRGDPGDTGAPGPVGMKGLSGDRGDAGFTGEQGHPGSPGFKGIDGMPGTPGLKGDRGSPGMDGFQGMPGLKGRPGFPGSKGEAGFFGIPGLKGLAGEPGFKGSRGDPGPPGPPPVILPGMKDIKGEKGDEGPMGLKGYLGAKGIQGMPGIPGLSGIPGLPGRPGHIKGVKGDIGVPGIPGLPGFPGVAGPPGITGFPGFIGSRGDKGAPGRAGLYGEIGATGDFGDIGDTINLPGRPGLKGERGTTGIPGLKGFFGEKGTEGDIGFPGITGVTGVQGPPGLKGQTGFPGLTGPPGSQGELGRIGLPGGKGDDGWPGAPGLPGFPGLRGIRGLHGLPGTKGFPGSPGSDIHGDPGFPGPPGERGDPGEANTLPGPVGVPGQKGDQGAPGERGPPGSPGLQGFPGITPPSNISGAPGDKGAPGIFGLKGYRGPPGPPGSAALPGSKGDTGNPGAPGTPGTKGWAGDSGPQGRPGVFGLPGEKGPRGEQGFMGNTGPTGAVGDRGPKGPKGDPGFPGAPGTVGAPGIAGIPQKIAVQPGTVGPQGRRGPPGAPGEMGPQGPPGEPGFRGAPGKAGPQGRGGVSAVPGFRGDEGPIGHQGPIGQEGAPGRPGSPGLPGMPGRSVSIGYLLVKHSQTDQEPMCPVGMNKLWSGYSLLYFEGQEKAHNQDLGLAGSCLARFSTMPFLYCNPGDVCYYASRNDKSYWLSTTAPLPMMPVAEDEIKPYISRCSVCEAPAIAIAVHSQDVSIPHCPAGWRSLWIGYSFLMHTAAGDEGGGQSLVSPGSCLEDFRATPFIECNGGRGTCHYYANKYSFWLTTIPEQSFQGSPSADTLKAGLIRTHISRCQVCMKNL

SEQ ID NO: 421 - protein, 1838 aa, Homo sapiens
MDVHTRWKARSALRPGAPLLPPLLLLLLWAPPPSRAAQPADLLKVLDFHNLPDGITKTTGFCATRRSSKGPDVAYRVTKDAQLSAPTKQLYPASAFPEDFSILTTVKAKKGSQAFLVSIYNEQGIQQIGLELGRSPVFLYEDHTGKPGPEDYPLFRGINLSDGKWHRIALSVHKKNVTLILDCKKKTTKFLDRSDHPMIDINGIIVFGTRILDEEVFEGDIQQLLFVSDHRAAYDYCEHYSPDCDTAVPDTPQSQDPNPDEYYTEGDGEGETYYYEYPYYEDPEDLGKEPTPSKKPVEAAKETTEVPEELTPTPTEAAPMPETSEGAGKEEDVGIGDYDYVPSEDYYTPSPYDDLTYGEGEENPDQPTDPGAGAEIPTSTADTSNSSNPAPPPGEGADDLEGEFTEETIRNLDENYYDPYYDPTSSPSEIGPGMPANQDTIYEGIGGPRGEKGQKGEPAIIEPGMLIEGPPGPEGPAGLPGPPGTMGPTGQVGDPGERGPPGRPGLPGADGLPGPPGTMLMLPFRFGGGGDAGSKGPMVSAQESQAQAILQQARLALRGPAGPMGLTGRPGPVGPPGSGGLKGEPGDVGPQGPRGVQGPPGPAGKPGRRGRAGSDGARGMPGQTGPKGDRGFDGLAGLPGEKGHRGDPGPSGPPGPPGDDGERGDDGEVGPRGLPGEPGPRGLLGPKGPPGPPGPPGVTGMDGQPGPKGNVGPQGEPGPPGQQGNPGAQGLPGPQGAIGPPGEKGPLGKPGLPGMPGADGPPGHPGKEGPPGEKGGQGPPGPQGPIGYPGPRGVKGADGIRGLKGTKGEKGEDGFPGFKGDMGIKGDRGEIGPPGPRGEDGPEGPKGRGGPNGDPGPLGPPGEKGKLGVPGLPGYPGRQGPKGSIGFPGFPGANGEKGGRGTPGKPGPRGQRGPTGPRGERGPRGITGKPGPKGNSGGDGPAGPPGERGPNGPQGPTGFPGPKGPPGPPGKDGLPGHPGQRGETGFQGKTGPPGPPGVVGPQGPTGETGPMGERGHPGPPGPPGEQGLPGLAGKEGTKGDPGPAGLPGKDGPPGLRGFPGDRGLPGPVGALGLKGNEGPPGPPGPAGSPGERGPAGAAGPIGIPGRPGPQGPPGPAGEKGAPGEKGPQGPAGRDGLQGPVGLPGPAGPVGPPGEDGDKGEIGEPGQKGSKGDKGEQGPPGPTGPQGPIGQPGPSGADGEPGPRGQQGLFGQKGDEGPRGFPGPPGPVGLQGLPGPPGEKGETGDVGQMGPPGPPGPRGPSGAPGADGPQGPPGGIGNPGAVGEKGEPGEAGEPGLPGEGGPPGPKGERGEKGESGPSGAAGPPGPKGPPGDDGPKGSPGPVGFPGDPGPPGEPGPAGQDGPPGDKGDDGEPGQTGSPGPTGEPGPSGPPGKRGPPGPAGPEGRQGEKGAKGEAGLEGPPGKTGPIGPQGAPGKPGPDGLRGIPGPVGEQGLPGSPGPDGPPGPMGPPGLPGLKGDSGPKGEKGHPGLIGLIGPPGEQGEKGDRGLPGPQGSSGPKGEQGITGPSGPIGPPGPPGLPGPPGPKGAKGSSGPTGPKGEAGHPGPPGPPGPPGEVIQPLPIQASRTRRNIDASQLLDDGNGENYVDYADGMEEIFGSLNSLKLEIEQMKRPLGTQQNPARTCKDLQLCHPDFPDGEYWVDPNQGCSRDSFKVYCNFTAGGSTCVFPDKKSEGARITSWPKENPGSWFSEFKRGKLLSYVDAEGNPVGVVQMTFLRLLSASAHQNVTYHCYQSVAWQDAATGSYDKALRFLGSNDEEMSYDNNPYIRALVDGCATKKGYQKTVLEIDTPKVEQVPIVDIMFNDFGEASQKFGFEVGPACFMG

SEQ ID NO: 422 - protein, 4 aa, Homo sapiens
  VARIANT (3)..(3): Xaa is any amino acid
PGXP

SEQ ID NO: 423 - protein, 6 aa, Homo sapiens
  VARIANT (4)..(4): Xaa is any amino acid
LPGXPG

SEQ ID NO: 424 - protein, 7 aa, Homo sapiens
  MOD_RES (3)..(3): Xaa is hydroxylproline
  VARIANT (5)..(5): Xaa is any amino acid
  MOD_RES (6)..(6): Xaa is hydroxylproline
GPXGXXG

SEQ ID NO: 425 - protein, 6 aa, Homo sapiens
RGDKGE

SEQ ID NO: 426 - protein, 153 aa, Homo sapiens
MYRMQLLSCIALSLALVTNSAPTSSSTKKTQLQLEHLLLDLQMILNGINNYKNPKLTRMLTFKFYMPKKATELKHLQCLEEELKPLEEVLNLAQSKNFHLRPRDLISNINVIVLELKGSETTFMCEYADETATIVEFLNRWITFCQSIISTLT

SEQ ID NO: 427 - protein, 133 aa, Homo sapiens
APTSSSTKKTQLQLEHLLLDLQMILNGINNYKNPKLTRMLTFKFYMPKKATELKHLQCLEEELKPLEEVLNLAQSKNFHLRPRDLISNINVIVLELKGSETTFMCEYADETATIVEFLNRWITFSQSIISTLT

SEQ ID NO: 428 - protein, 133 aa, Homo sapiens
APTSSSTKKTQLQLEHLLLDLQMILNGINNYKNPKLTRMLTFKFYMPKKATELKHLQCLEEELKPLEEVLNLAHSKNFHFDPRDVVSNINVFVLELKGSETTFMCEYADETATIVEFLNRWITFCQSIISTLT

SEQ ID NO: 429 - protein, 133 aa, Homo sapiens
APASSSTKKTQLQLEHLLLDLQMILNGINNYKNPKLTRMLTFKFYMPKKATELKHLQCLEEELKPLEEVLNLAQSKNFHLRPRDLISNINVIVLELKGSETTFMCEYADETATIVEFLNRWITFSQSIISTLT

SEQ ID NO: 430 - protein, 133 aa, Homo sapiens
APASSSTKKTQLQLEHLLLDLQMILNGINNYKNPKLTRMLTAKFYMPKKATELKHLQCLEEELKPLEEVLNLAQSKNFHLRPRDLISNINVIVLELKGSETTFMCEYADETATIVEFLNRWITFSQSIISTLT

SEQ ID NO: 431 - protein, 133 aa, Homo sapiens
APASSSTKKTQLQLEHLLLDLQMILNGINNYKNPKLTRMLTFKFYMPKKATELKHLQCLEEELKPLEEALNLAPSKNFHLRPRDLISNINVIVLELKGSETTFMCEYADETATIVEFLNRWITFSQSTISTLT

SEQ ID NO: 432 - protein, 133 aa, Homo sapiens
APASSSTKKTQLQLEHLLLTLQMILNGINNYKNPKLTRMLTFKFYMPKKATELKHLQCLEEELKPLEEVLNLAQSKNFHLRPRDLISNINVIVLELKGSETTFMCEYADETATIVEFLNRWITFSQSIISTLT

SEQ ID NO: 433 - protein, 133 aa, Homo sapiens
APASSSTKKTQLQLEHLLLTLQMILNGINNYKNPKLTRMLTAKFYMPKKATELKHLQCLEEELKPLEEVLNLAQSKNFHLRPRDLISNINVIVLELKGSETTFMCEYADETATIVEFLNRWITFSQSIISTLT

SEQ ID NO: 434 - protein, 133 aa, Homo sapiens
APASSSTKKTQLQLEHLLLDLQMILNGINNYKNPKLTEMLTFKFYMPKKATELKHLQCLEEELKPLEEVLNLAQSKNFHLRPRDLISNINVIVLELKGSETTFMCEYADETATIVEFLNRWITFSQSIISTLT

SEQ ID NO: 435 - protein, 133 aa, Homo sapiens
APASSSTKKTQLQLEHLLLDLQMILNGINNYKNPKLTRMLTFKFYMPKKATELKHLQCLEKELKPLEEVLNLAQSKNFHLRPRDLISNINVIVLELKGSETTFMCEYADETATIVEFLNRWITFSQSIISTLT

SEQ ID NO: 436 - protein, 133 aa, Homo sapiens
APASSSTKKTQLQLEHLLLDLQMILNGINNYKNPKLTRMLTFKFYMPKKATELKHLQCLEEKLKPLEEVLNLAQSKNFHLRPRDLISNINVIVLELKGSETTFMCEYADETATIVEFLNRWITFSQSIISTLT

SEQ ID NO: 437 - protein, 133 aa, Homo sapiens
APASSSTKKTQLQLEHLLLDLQMILNGINNYKNPKLTRMLTFKFYMPKKATELKHLQCLEKKLKPLEEVLNLAQSKNFHLRPRDLISNINVIVLELKGSETTFMCEYADETATIVEFLNRWITFSQSIISTLT

SEQ ID NO: 438 - protein, 133 aa, Homo sapiens
APASSSTKKTQLQLEHLLLDLQMILNGINNYKNPKLTEMLTFKFYMPKKATELKHLQCLEKKLKPLEEVLNLAQSKNFHLRPRDLISNINVIVLELKGSETTFMCEYADETATIVEFLNRWITFSQSIISTLT

SEQ ID NO: 439 - protein, 133 aa, Homo sapiens
APASSSTKKTQLQLEHLLLDLQMILNGINNYKNPKLTEMLTAKFYMPKKATELKHLQCLEEELKPLEEVLNLAQSKNFHLRPRDLISNINVIVLELKGSETTFMCEYADETATIVEFLNRWITFSQSIISTLT

SEQ ID NO: 440 - protein, 133 aa, Homo sapiens
APASSSTKKTQLQLEHLLLDLQMILNGINNYKNPKLTRMLTAKFYMPKKATELKHLQCLEKELKPLEEVLNLAQSKNFHLRPRDLISNINVIVLELKGSETTFMCEYADETATIVEFLNRWITFSQSIISTLT

SEQ ID NO: 441 - protein, 133 aa, Homo sapiens
APASSSTKKTQLQLEHLLLDLQMILNGINNYKNPKLTRMLTAKFYMPKKATELKHLQCLEEKLKPLEEVLNLAQSKNFHLRPRDLISNINVIVLELKGSETTFMCEYADETATIVEFLNRWITFSQSIISTLT

SEQ ID NO: 442 - protein, 133 aa, Homo sapiens
APASSSTKKTQLQLEHLLLDLQMILNGINNYKNPKLTRMLTAKFYMPKKATELKHLQCLEKKLKPLEEVLNLAQSKNFHLRPRDLISNINVIVLELKGSETTFMCEYADETATIVEFLNRWITFSQSIISTLT

SEQ ID NO: 443 - protein, 133 aa, Homo sapiens
APASSSTKKTQLQLEHLLLDLQMILNGINNYKNPKLTEMLTAKFYMPKKATELKHLQCLEKKLKPLEEVLNLAQSKNFHLRPRDLISNINVIVLELKGSETTFMCEYADETATIVEFLNRWITFSQSIISTLT

SEQ ID NO: 444 - protein, 162 aa, Homo sapiens
MRISKPHLRSISIQCYLCLLLNSHFLTEAGIHVFILGCFSAGLPKTEANWVNVISDLKKIEDLIQSMHIDATLYTESDVHPSCKVTAMKCFLLELQVISLESGDASIHDTVENLIILANNSLSSNGNVTESGCKECEELEEKNIKEFLQSFVHIVQMFINTS

SEQ ID NO: 445 - protein, 114 aa, Homo sapiens
NWVNVISDLKKIEDLIQSMHIDATLYTESDVHPSCKVTAMKCFLLELQVISLESGDASIHDTVENLIILANNSLSSNGNVTESGCKECEELEEKNIKEFLQSFVHIVQMFINTS

SEQ ID NO: 446 - protein, 114 aa, Homo sapiens
NWVNVISDLKKIEDLIQSMHIDATLYTESDVHPSCKVTAMKCFLLELQVISLESGDASIHDTVENLIILANNSLSSNGNVTESGCKECEELEEKNIKEFLQSFVHIVQMFINTA

SEQ ID NO: 447 - protein, 114 aa, Homo sapiens
NWVNVISDLKKIEDLIQSMHIDATLYTESDVHPSCKVTAMKCFLLELQDISLESGDASIHDTVENLIILANNSLSSNGNVTESGCKECEELEEKNIKEFLQSFVHIVQMFINTA

SEQ ID NO: 448 - protein, 114 aa, Homo sapiens
NWVNVISDLKKIEDLIQSMHIDATLYTESDVHPSCKVTAMKCFLLELQVDSLESGDASIHDTVENLIILANNSLSSNGNVTESGCKECEELEEKNIKEFLQSFVHIVQMFINTA

SEQ ID NO: 449 - protein, 114 aa, Homo sapiens
NWVNVISDLKKIEDLIQSMHIDATLYTESDVHPSCKVTAMKCFLLELQVISLESGDASIHDTVENEIILANNSLSSNGNVTESGCKECEELEEKNIKEFLQSFVHIVQMFINTA

SEQ ID NO: 450 - protein, 114 aa, Homo sapiens
NWVNVISNLKKIEDLIQSMHIDATLYTESDVHPSCKVTAMKCFLLELQVISLESGDASIHDTVENLIILANNSLSSNGNVTESGCKECEELEEKNIKEFLQSFVHIVQMFINTA

SEQ ID NO: 451 - protein, 114 aa, Homo sapiens
NWVNVISDLKKIEDLIQSMHIDATLYTESDVHPSCKVTAMKCFLLKLQVISLESGDASIHDTVENLIILANNSLSSNGNVTESGCKECEELEEKNIKEFLQSFVHIVQMFINTA

SEQ ID NO: 452 - protein, 114 aa, Homo sapiens
NWVNVISDLKKIEDLIQSMHIDATLYTESDVHPSCKVTAMKCFLLKLQVISLKSGDASIHDTVENLIILANNSLSSNGNVTESGCKECEELEEKNIKEFLQSFVHIVQMFINTA

SEQ ID NO: 453 - protein, 114 aa, Homo sapiens
NWVNVISDLKKIEDLIQSMHIKATLYTESDVHPSCKVTAMKCFLLKLQVISLESGDASIHDTVENLIILANNSLSSNGNVTESGCKECEELEEKNIKEFLQSFVHIVQMFINTA

SEQ ID NO: 454 - protein, 114 aa, Homo sapiens
NWVNVISDLKKIEDLIQSMHIKATLYTESDVHPSCKVTAMKCFLLKLQVISLKSGDASIHDTVENLIILANNSLSSNGNVTESGCKECEELEEKNIKEFLQSFVHIVQMFINTA

SEQ ID NO: 455 - protein, 104 aa, Artificial Sequence
  Made in Lab - hybrid IL2 IL15 sequence
GSHMPKKKIQLHAEHALYDALMILNIVKTNSPPAEEKLEDYAFNFELILEEIARLFESGDQKDEAEKAKRMKEWMKRIKTTASEDEQEEMANAIITILQSWIFS

SEQ ID NO: 456 - protein, 281 aa, Homo sapiens [sequence omitted]

SEQ ID NO: 457 - protein, 168 aa, Homo sapiens
VRERGPQRVAAHITGTRGRSNTLSSPNSKNEKALGRKINSWESSRSGHSFLSNLHLRNGELVIHEKGFYYIYSQTYFRFQEEIKENTKNDKQMVQYIYKYTSYPDPILLMKSARNSCWSKDAEYGLYSIYQGGIFELKENDRIFVSVTNEHLIDMDHEASFFGAFLVG

SEQ ID NO: 458 - protein, 254 aa, Homo sapiens
MEYASDASLDPEAPWPPAPRARACRVLPWALVAGLLLLLLLAAACAVFLACPWAVSGARASPGSAASPRLREGPELSPDDPAGLLDLRQGMFAQLVAQNVLLIDGPLSWYSDPGLAGVSLTGGLSYKEDTKELVVAKAGVYYVFFQLELRRVVAGEGSGSVSLALHLQPLRSAAGAAALALTVDLPPASSEARNSAFGFQGRLLHLSAGQRLGVHLHTEARARHAWQLTQGATVLGLFRVTPEIPAGLPSPRSE

SEQ ID NO: 459 - protein, 205 aa, Homo sapiens
ACPWAVSGARASPGSAASPRLREGPELSPDDPAGLLDLRQGMFAQLVAQNVLLIDGPLSWYSDPGLAGVSLTGGLSYKEDTKELVVAKAGVYYVFFQLELRRVVAGEGSGSVSLALHLQPLRSAAGAAALALTVDLPPASSEARNSAFGFQGRLLHLSAGQRLGVHLHTEARARHAWQLTQGATVLGLFRVTPEIPAGLPSPRSE

SEQ ID NO: 460 - protein, 219 aa, Homo sapiens
MCPARSLLLVATLVLLDHLSLARNLPVATPDPGMFPCLHHSQNLLRAVSNMLQKARQTLEFYPCTSEEIDHEDITKDKTSTVEACLPLELTKNESCLNSRETSFITNGSCLASRKTSFMMALCLSSIYEDLKMYQVEFKTMNAKLLMDPKRQIFLDQNMLAVIDELMQALNFNSETVPQKSSLEEPDFYKTKIKLCILLHAFRIRAVTIDRVMSYLNAS

SEQ ID NO: 461 - protein, 197 aa, Homo sapiens
RNLPVATPDPGMFPCLHHSQNLLRAVSNMLQKARQTLEFYPCTSEEIDHEDITKDKTSTVEACLPLELTKNESCLNSRETSFITNGSCLASRKTSFMMALCLSSIYEDLKMYQVEFKTMNAKLLMDPKRQIFLDQNMLAVIDELMQALNFNSETVPQKSSLEEPDFYKTKIKLCILLHAFRIRAVTIDRVMSYLNAS

SEQ ID NO: 462 - protein, 328 aa, Homo sapiens
MCHQQLVISWFSLVFLASPLVAIWELKKDVYVVELDWYPDAPGEMVVLTCDTPEEDGITWTLDQSSEVLGSGKTLTIQVKEFGDAGQYTCHKGGEVLSHSLLLLHKKEDGIWSTDILKDQKEPKNKTFLRCEAKNYSGRFTCWWLTTISTDLTFSVKSSRGSSDPQGVTCGAATLSAERVRGDNKEYEYSVECQEDSACPAAEESLPIEVMVDAVHKLKYENYTSSFFIRDIIKPDPPKNLQLKPLKNSRQVEVSWEYPDTWSTPHSYFSLTFCVQVQGKSKREKKDRVFTDKTSATVICRKNASISVRAQDRYYSSSWSEWASVPCS

SEQ ID NO: 463 - protein, 306 aa, Homo sapiens
IWELKKDVYVVELDWYPDAPGEMVVLTCDTPEEDGITWTLDQSSEVLGSGKTLTIQVKEFGDAGQYTCHKGGEVLSHSLLLLHKKEDGIWSTDILKDQKEPKNKTFLRCEAKNYSGRFTCWWLTTISTDLTFSVKSSRGSSDPQGVTCGAATLSAERVRGDNKEYEYSVECQEDSACPAAEESLPIEVMVDAVHKLKYENYTSSFFIRDIIKPDPPKNLQLKPLKNSRQVEVSWEYPDTWSTPHSYFSLTFCVQVQGKSKREKKDRVFTDKTSATVICRKNASISVRAQDRYYSSSWSEWASVPCS

SEQ ID NO: 464 - protein, 84 aa, Homo sapiens
IWELKKDVYVVELDWYPDAPGEMVVLTCDTPEEDGITWTLDQSSEVLGSGKTLTIQVKEFGDAGQYTCHKGGEVLSHSLLLLHK

SEQ ID NO: 465 - protein, 92 aa, Homo sapiens
PPKNLQLKPLKNSRQVEVSWEYPDTWSTPHSYFSLTFCVQVQGKSKREKKDRVFTDKTSATVICRKNASISVRAQDRYYSSSWSEWASVPCS

SEQ ID NO: 466 - protein, 178 aa, Homo sapiens
MHSSALLCCLVLLTGVRASPGQGTQSENSCTHFPGNLPNMLRDLRDAFSRVKTFFQMKDQLDNLLLKESLLEDFKGYLGCQALSEMIQFYLEEVMPQAENQDPDIKAHVNSLGENLKTLRLRLRRCHRFLPCENKSKAVEQVKNAFNKLQEKGIYKAMSEFDIFINYIEAYMTMKIRN

SEQ ID NO: 467 - protein, 160 aa, Homo sapiens
SPGQGTQSENSCTHFPGNLPNMLRDLRDAFSRVKTFFQMKDQLDNLLLKESLLEDFKGYLGCQALSEMIQFYLEEVMPQAENQDPDIKAHVNSLGENLKTLRLRLRRCHRFLPCENKSKAVEQVKNAFNKLQEKGIYKAMSEFDIFINYIEAYMTMKIRN

SEQ ID NO: 468 - protein, 188 aa, Homo sapiens [sequence omitted]

SEQ ID NO: 469 - protein, 165 aa, Homo sapiens
CDLPQTHSLGSRRTLMLLAQMRKISLFSCLKDRHDFGFPQEEFGNQFQKAETIPVLHEMIQQIFNLFSTKDSSAAWDETLLDKFYTELYQQLNDLEACVIQGVGVTETPLMKEDSILAVRKYFQRITLYLKEKKYSPCAWEVVRAEIMRSFSLSTNLQESLRSKE

SEQ ID NO: 470 - protein, 167 aa, Homo sapiens
MCDLPQTHSLGNRRALILLAQMRRISPFSCLKDRHDFGFPQEEFDGNQFQKAQAISVLHEMIQQTFNLFSTKDSSAAWDESLLEKFYTELYQQLNDLEACVIQEVGVEETPLMNVDSILAVKKYFQRITLYLTEKKYSPCAWEVVRAEIMRSFSLSTNLQERLRRKE

SEQ ID NO: 471 - protein, 165 aa, Homo sapiens
CDLPQTHSLGSRRTLMLLAQMRRISLFSCLKDRHDFGFPQEEFGNQFQKAETIPVLHEMIQQIFNLFSTKDSSAAWDETLLDKFYTELYQQLNDLEACVIQGVGVTETPLMNEDSILAVRKYFQRITLYLKEKKYSPCAWEVVRAEIMRSFSLSTNLQESLRSKE

SEQ ID NO: 472 - protein, 165 aa, Homo sapiens
CDLPQTHSLGSRRTLMLLAQMRRISLFSCLKDRRDFGFPQEEFGNQFQKAETIPVLHEMIQQIFNLFSTKDSSAAWDETLLDKFYTELYQQLNDLEACVIQGVGVTETPLMNEDSILAVRKYFQRITLYLKEKKYSPCAWEVVRAEIMRSFSLSTNLQESLRSKE

SEQ ID NO: 473 - protein, 177 aa, Homo sapiens
MFHVSFRYIFGLPPLILVLLPVASSDCDIEGKDGKQYESVLMVSIDQLLDSMKEIGSNCLNNEFNFFKRHICDANKEGMFLFRAARKLRQFLKMNSTGDFDLHLLKVSEGTTILLNCTGQVKGRKPAALGEAQPTKSLEENKSLKEQKKLNDLCFLKRLLQEIKTCWNKILMGTKEH

SEQ ID NO: 474 - protein, 152 aa, Homo sapiens
DCDIEGKDGKQYESVLMVSIDQLLDSMKEIGSNCLNNEFNFFKRHICDANKEGMFLFRAARKLRQFLKMNSTGDFDLHLLKVSEGTTILLNCTGQVKGRKPAALGEAQPTKSLEENKSLKEQKKLNDLCFLKRLLQEIKTCWNKILMGTKEH

SEQ ID NO: 475 - protein, 152 aa, Homo sapiens
DCDIEGKDGKQYESVLMVSIDQLLDSMKEIGSNCLNNEFNFFKRHICDANKEGMFLFRAARKLRQFLKMNSTGDFDLHLLKVSEGTTILLNCTGQVKGRKPAALGAAQPTKSLEENKSLKEQKKLNDLCFLKRLLQEIKTCWNKILMGTKEH

SEQ ID NO: 476 - protein, 162 aa, Homo sapiens
MRSSPGNMERIVICLMVIFLGTLVHKSSSQGQDRHMIRMRQLIDIVDQLKNYVNDLVPEFLPAPEDVETNCEWSAFSCFQKAQLKSANTGNNERIINVSIKKLKRKPPSTNAGRRQKHRLTCPSCDSYEKKPPKEFLERFKSLLQKMIHQHLSSRTHGSEDS

SEQ ID NO: 477 - protein, 138 aa, Homo sapiens
HKSSSQGQDRHMIRMRQLIDIVDQLKNYVNDLVPEFLPAPEDVETNCEWSAFSCFQKAQLKSANTGNNERIINVSIKKLKRKPPSTNAGRRQKHRLTCPSCDSYEKKPPKEFLERFKSLLQKMIHQHLSSRTHGSEDS

SEQ ID NO: 478 - protein, 132 aa, Homo sapiens
GQDRHMIRMRQLIDIVDQLKNYVNDLVPEFLPAPEDVETNCEWSAFSCFQKAQLKSANTGNNERIINVSIKKLKRKPPSTNAGRRQKHRLTCPSCDSYEKKPPKEFLERFKSLLQKMIHQHLSSRTHGSEDS

SEQ ID NO: 479 - protein, 4 aa, Artificial Sequence
  Peptide linker sequence
GSGS

SEQ ID NO: 480 - protein, 4 aa, Artificial Sequence
  Peptide linker sequence
GGSG

SEQ ID NO: 481 - protein, 4 aa, Artificial Sequence
  Peptide linker sequence
GGGS

SEQ ID NO: 482 - protein, 5 aa, Artificial Sequence
  Peptide linker sequence
GSGGG

SEQ ID NO: 483 - protein, 5 aa, Artificial Sequence
  Peptide linker sequence
GGGGS

SEQ ID NO: 484 - protein, 4 aa, Artificial Sequence
  Peptide linker sequence
GNGN

SEQ ID NO: 485 - protein, 4 aa, Artificial Sequence
  Peptide linker sequence
GGNG

SEQ ID NO: 486 - protein, 4 aa, Artificial Sequence
  Peptide linker sequence
GGGN

SEQ ID NO: 487 - protein, 5 aa, Artificial Sequence
  Peptide linker sequence
GGGGN

SEQ ID NO: 488 - protein, 5 aa, Artificial Sequence
  Peptide linker sequence
DGGGS

SEQ ID NO: 489 - protein, 5 aa, Artificial Sequence
  Peptide linker sequence
TGEKP

SEQ ID NO: 490 - protein, 4 aa, Artificial Sequence
  Peptide linker sequence
GGRR

SEQ ID NO: 491 - protein, 14 aa, Artificial Sequence
  Peptide linker sequence
EGKSSGSGSESKVD

SEQ ID NO: 492 - protein, 18 aa, Artificial Sequence
  Peptide linker sequence
KESGSVSSEQLAQFRSLD

SEQ ID NO: 493 - protein, 8 aa, Artificial Sequence
  Peptide linker sequence
GGRRGGGS

SEQ ID NO: 494 - protein, 9 aa, Artificial Sequence
  Peptide linker sequence
LRQRDGERP

SEQ ID NO: 495 - protein, 12 aa, Artificial Sequence
  Peptide linker sequence
LRQKDGGGSERP

SEQ ID NO: 496 - protein, 16 aa, Artificial Sequence
  Peptide linker sequence
LRQKDGGGSGGGSERP

SEQ ID NO: 497 - protein, 6 aa, Artificial Sequence
  Cleavable peptide linker sequence
PLGLAG

SEQ ID NO: 498 - protein, 7 aa, Artificial Sequence
  Cleavable peptide linker sequence
SGRSDNR

SEQ ID NO: 499 - protein, 13 aa, Artificial Sequence
  Cleavable peptide linker sequence
PLGLAGSGRSDNR

SEQ ID NO: 500 - protein, 12 aa, Artificial Sequence
  Cleavable peptide linker sequence
GSLSGRSDNHGS

SEQ ID NO: 501 - protein, 10 aa, Artificial Sequence
  Cleavable peptide linker sequence
LGGSGRSANA

SEQ ID NO: 502 - protein, 9 aa, Artificial Sequence
  Cleavable peptide linker sequence
LSGRSANAG

SEQ ID NO: 503 - protein, 12 aa, Artificial Sequence
  Cleavable peptide linker sequence
GPLGLAGRSANA

SEQ ID NO: 504 - protein, 14 aa, Artificial Sequence
  Cleavable peptide linker sequence
PLGLSGRSANAGPA

SEQ ID NO: 505 - protein, 14 aa, Artificial Sequence
  Cleavable peptide linker sequence
PLGLAGRSANAGPA

SEQ ID NO: 506 - protein, 17 aa, Artificial Sequence
  Cleavable peptide linker sequence
GPLGLSGRSANAGPASG

SEQ ID NO: 507 - protein, 17 aa, Artificial Sequence
  Cleavable peptide linker sequence
GPLGLAGRSANAGPASG

SEQ ID NO: 508 - protein, 17 aa, Artificial Sequence
  Cleavable peptide linker sequence
SGPLGLAGRSANAGPAS

SEQ ID NO: 509 - protein, 17 aa, Artificial Sequence
  Cleavable peptide linker sequence
SGPASGRSANAPLGLAG

SEQ ID NO: 510 - protein, 17 aa, Artificial Sequence
  Cleavable peptide linker sequence
GPASGRSANAPLGLAGS

SEQ ID NO: 511 - protein, 17 aa, Artificial Sequence
  Cleavable peptide linker sequence
GPLGLAGRSANPGPASG

SEQ ID NO: 512 - protein, 17 aa, Artificial Sequence
  Cleavable peptide linker sequence
GPLGLAGRSDNHGPASG

SEQ ID NO: 513 - protein, 17 aa, Artificial Sequence
  Cleavable peptide linker sequence
GPLGLAGRSDNPGPASG

SEQ ID NO: 514 - protein, 17 aa, Artificial Sequence
  Cleavable peptide linker sequence
GPLGLAGRSENPGPASG

SEQ ID NO: 515 - protein, 17 aa, Artificial Sequence
  Cleavable peptide linker sequence
GPLGLAGRSDNLGPASG

SEQ ID NO: 516 - protein, 17 aa, Artificial Sequence
  Cleavable peptide linker sequence
GPLGLAGRNAQVGPASG

SEQ ID NO: 517 - protein, 8 aa, Artificial Sequence
  Cleavable peptide linker sequence
LSGRSDNA

SEQ ID NO: 518 - protein, 8 aa, Artificial Sequence
  Cleavable peptide linker sequence
LSGRSDND

SEQ ID NO: 519 - protein, 8 aa, Artificial Sequence
  Cleavable peptide linker sequence
LSGRSDNE

SEQ ID NO: 520 - protein, 8 aa, Artificial Sequence
  Cleavable peptide linker sequence
LSGRSDNF

SEQ ID NO: 521 - protein, 8 aa, Artificial Sequence
  Cleavable peptide linker sequence
LSGRSDNG

SEQ ID NO: 522 - protein, 8 aa, Artificial Sequence
  Cleavable peptide linker sequence
LSGRSDNI

SEQ ID NO: 523 - protein, 8 aa, Artificial Sequence
  Cleavable peptide linker sequence
LSGRSDNK

SEQ ID NO: 524 - protein, 8 aa, Artificial Sequence
  Cleavable peptide linker sequence
LSGRSDNL

SEQ ID NO: 525 - protein, 8 aa, Artificial Sequence
  Cleavable peptide linker sequence
LSGRSDNM

SEQ ID NO: 526 - protein, 8 aa, Artificial Sequence
  Cleavable peptide linker sequence
LSGRSDNN

SEQ ID NO: 527 - protein, 8 aa, Artificial Sequence
  Cleavable peptide linker sequence
LSGRSDNP

SEQ ID NO: 528 - protein, 8 aa, Artificial Sequence
  Cleavable peptide linker sequence
LSGRSDNQ

SEQ ID NO: 529 - protein, 8 aa, Artificial Sequence
  Cleavable peptide linker sequence
LSGRSDNR

SEQ ID NO: 530 - protein, 8 aa, Artificial Sequence
  Cleavable peptide linker sequence
LSGRSDNS

SEQ ID NO: 531 - protein, 8 aa, Artificial Sequence
  Cleavable peptide linker sequence
LSGRSDNT

SEQ ID NO: 532 - protein, 8 aa, Artificial Sequence
  Cleavable peptide linker sequence
LSGRSDNV

SEQ ID NO: 533 - protein, 8 aa, Artificial Sequence
  Cleavable peptide linker sequence
LSGRSDNW

SEQ ID NO: 534 - protein, 8 aa, Artificial Sequence
  Cleavable peptide linker sequence
LSGRSDNY

SEQ ID NO: 535 - protein, 8 aa, Artificial Sequence
  Cleavable peptide linker sequence
LSGRSAND

SEQ ID NO: 536 - protein, 8 aa, Artificial Sequence
  Cleavable peptide linker sequence
LSGRSANE

SEQ ID NO: 537 - protein, 8 aa, Artificial Sequence
  Cleavable peptide linker sequence
LSGRSANF

SEQ ID NO: 538 - protein, 8 aa, Artificial Sequence
  Cleavable peptide linker sequence
LSGRSANG

SEQ ID NO: 539 - protein, 8 aa, Artificial Sequence
  Cleavable peptide linker sequence
LSGRSANH

SEQ ID NO: 540 - protein, 8 aa, Artificial Sequence
  Cleavable peptide linker sequence
LSGRSANI

SEQ ID NO: 541 - protein, 8 aa, Artificial Sequence
  Cleavable peptide linker sequence
LSGRSANK

SEQ ID NO: 542 - protein, 8 aa, Artificial Sequence
  Cleavable peptide linker sequence
LSGRSANL

SEQ ID NO: 543 - protein, 8 aa, Artificial Sequence
  Cleavable peptide linker sequence
LSGRSANM

SEQ ID NO: 544 - protein, 8 aa, Artificial Sequence
  Cleavable peptide linker sequence
LSGRSANN

SEQ ID NO: 545 - protein, 8 aa, Artificial Sequence
  Cleavable peptide linker sequence
LSGRSANP

SEQ ID NO: 546 - protein, 8 aa, Artificial Sequence
  Cleavable peptide linker sequence
LSGRSANQ

SEQ ID NO: 547 - protein, 8 aa, Artificial Sequence
  Cleavable peptide linker sequence
LSGRSANR

SEQ ID NO: 548 - protein, 8 aa, Artificial Sequence
  Cleavable peptide linker sequence
LSGRSANS

SEQ ID NO: 549 - protein, 8 aa, Artificial Sequence
  Cleavable peptide linker sequence
LSGRSANT

SEQ ID NO: 550 - protein, 8 aa, Artificial Sequence
  Cleavable peptide linker sequence
LSGRSANV

SEQ ID NO: 551 - protein, 8 aa, Artificial Sequence
  Cleavable peptide linker sequence
LSGRSANW

SEQ ID NO: 552 - protein, 8 aa, Artificial Sequence
  Cleavable peptide linker sequence
LSGRSANY

SEQ ID NO: 553 - protein, 12 aa, Artificial Sequence
  Cleavable peptide linker sequence
PLGLAGRSDNHS

SEQ ID NO: 554 - protein, 15 aa, Artificial Sequence
  Cleavable peptide linker sequence
PLGLAGSGRSDNRGA

SEQ ID NO: 555 - protein, 15 aa, Artificial Sequence
  Cleavable peptide linker sequence
PLGLAGSGRSDNQGA

SEQ ID NO: 556 - protein, 15 aa, Artificial Sequence
  Cleavable peptide linker sequence
PLGLAGSGRSDNYGA

SEQ ID NO: 557 - protein, 15 aa, Artificial Sequence
  Cleavable peptide linker sequence
GPLGLAGSGRSDNQG

SEQ ID NO: 558 - protein, 13 aa, Artificial Sequence
  Cleavable peptide linker sequence
PLGLAGSGRSDNQ

SEQ ID NO: 559 - protein, 13 aa, Artificial Sequence
  Cleavable peptide linker sequence
PLGLAGSGRSDNH

SEQ ID NO: 560 - protein, 13 aa, Artificial Sequence
  Cleavable peptide linker sequence
PLGLAGSGRSDNT

SEQ ID NO: 561 - protein, 7 aa, Artificial Sequence
  Cleavable peptide linker sequence
SGRSDNH

SEQ ID NO: 562 - protein, 781 aa, Artificial Sequence
  Made in Lab - Fusion construct
QVTLKESGPALVKPTQTLTLTCTFSGFSLSTSGMGVGWIRQPPGKALEWLADIWWDDNKYANPSLKSRLTISKDTSKNQVVLTMTNMDPVDTATYYCARRANYGNPYYAQDYWGQGTTVTVSSASTKGPSVFPLAPSSKSTSGGTAALGCLVKDYFPEPVTVSWNSGALTSGVHTFPAVLQSSGLYSLSSVVTVPSSSLGTQTYICNVNHKPSNTKVDKKVEPKSCDKTHTCPPCPAPEAAGGPSVFLFPPKPKDTLMISRTPEVTCVVVDVSHEDPEVKFNWYVDGVEVHNAKTKPREEQYNSTYRVVSVLTVLHQDWLNGKEYKCKVSNKALAAPIEKTISKAKGQPREPQVYTLPPSRDELTKNQVSLTCLVKGFYPSDIAVEWESNGQPENNYKTTPPVLDSDGSFFLYSKLTVDKSRWQQGNVFSCSVMHEALHNHYTQKSLSLSPGGGSPLGLAGGGSGGSTKKTQLQLEHLLLDLQMILNGINNYKNPELTRMLTAKFYMPKKATELKHLQCLEEELKPLEEVLNLAHSKNFHFDPRDVVSNINVFVLELKGSETTFMCEYADETATIVEFLNRWITFSQSIISTLTGGSGGPLGLAGSGRSDNRGGAELCDDDPPEIPHATFKAMAYKEGTMLNCECKRGFRRIKSGSLYMLCTGNSSHSSWDNQCQCTSSATRNTTKQVTPQPEEQKERKTTEMQSPMQPVDQASLPGHCREPPPWENEATERIYHFVVGQMVYYQCVQGYRALHRGPAESVCKMTHGKTRWTQPQLICTGE

SEQ ID NO: 563 - protein, 219 aa, Artificial Sequence; identical to SEQ ID NO: 272
  Made in Lab - Fusion construct

SEQ ID NO: 564 - protein, 781 aa, Artificial Sequence
  Made in Lab - Fusion construct
QVTLKESGPALVKPTQTLTLTCTFSGFSLSTSGMGVGWIRQPPGKALEWLADIWWDDNKYANPSLKSRLTISKDTSKNQVVLTMTNMDPVDTATYYCARRANYGNPYYAQDYWGQGTTVTVSSASTKGPSVFPLAPSSKSTSGGTAALGCLVKDYFPEPVTVSWNSGALTSGVHTFPAVLQSSGLYSLSSVVTVPSSSLGTQTYICNVNHKPSNTKVDKKVEPKSCDKTHTCPPCPAPEAAGGPSVFLFPPKPKDTLMISRTPEVTCVVVDVSHEDPEVKFNWYVDGVEVHNAKTKPREEQYNSTYRVVSVLTVLHQDWLNGKEYKCKVSNKALAAPIEKTISKAKGQPREPQVYTLPPSRDELTKNQVSLTCLVKGFYPSDIAVEWESNGQPENNYKTTPPVLDSDGSFFLYSKLTVDKSRWQQGNVFSCSVMHEALHNHYTQKSLSLSPGGGSGGSGGSGGSGGSTKKTQLQLEHLLLDLQMILNGINNYKNPELTRMLTAKFYMPKKATELKHLQCLEEELKPLEEVLNLAHSKNFHFDPRDVVSNINVFVLELKGSETTFMCEYADETATIVEFLNRWITFSQSIISTLTGGSGGGGSGGSGGSGGSGGGAELCDDDPPEIPHATFKAMAYKEGTMLNCECKRGFRRIKSGSLYMLCTGNSSHSSWDNQCQCTSSATRNTTKQVTPQPEEQKERKTTEMQSPMQPVDQASLPGHCREPPPWENEATERIYHFVVGQMVYYQCVQGYRALHRGPAESVCKMTHGKTRWTQPQLICTGE

SEQ ID NO: 565 - protein, 219 aa, Artificial Sequence; identical to SEQ ID NO: 272
  Made in Lab - Fusion construct

SEQ ID NO: 566 - protein, 781 aa, Artificial Sequence
  Made in Lab - Fusion construct
QVTLKESGPALVKPTQTLTLTCTFSGFSLSTPGMGVWWIRQPPGKALEWLADIWWDDNKYTNPSLKSRLTISKDTSKNQVVLTMTNMDPVDTATYYCARRANYGNPYYAQDYWGQGTTVTVSSASTKGPSVFPLAPSSKSTSGGTAALGCLVKDYFPEPVTVSWNSGALTSGVHTFPAVLQSSGLYSLSSVVTVPSSSLGTQTYICNVNHKPSNTKVDKKVEPKSCDKTHTCPPCPAPEAAGGPSVFLFPPKPKDTLMISRTPEVTCVVVDVSHEDPEVKFNWYVDGVEVHNAKTKPREEQYNSTYRVVSVLTVLHQDWLNGKEYKCKVSNKALAAPIEKTISKAKGQPREPQVYTLPPSRDELTKNQVSLTCLVKGFYPSDIAVEWESNGQPENNYKTTPPVLDSDGSFFLYSKLTVDKSRWQQGNVFSCSVMHEALHNHYTQKSLSLSPGGGSPLGLAGGGSGGSTKKTQLQLEHLLLDLQMILNGINNYKNPELTRMLTAKFYMPKKATELKHLQCLEEELKPLEEVLNLAHSKNFHFDPRDVVSNINVFVLELKGSETTFMCEYADETATIVEFLNRWITFSQSIISTLTGGSGGPLGLAGSGRSDNRGGAELCDDDPPEIPHATFKAMAYKEGTMLNCECKRGFRRIKSGSLYMLCTGNSSHSSWDNQCQCTSSATRNTTKQVTPQPEEQKERKTTEMQSPMQPVDQASLPGHCREPPPWENEATERIYHFVVGQMVYYQCVQGYRALHRGPAESVCKMTHGKTRWTQPQLICTGE

SEQ ID NO: 567 - protein, 219 aa, Artificial Sequence; identical to SEQ ID NO: 276
  Made in Lab - Fusion construct

SEQ ID NO: 568 - protein, 781 aa, Artificial Sequence; identical to SEQ ID NO: 566
  Made in Lab - Fusion construct

SEQ ID NO: 569 - protein, 219 aa, Artificial Sequence; identical to SEQ ID NO: 314
  Made in Lab - Fusion construct

SEQ ID NO: 570 - protein, 781 aa, Artificial Sequence
  Made in Lab - Fusion construct
QVTLKESGPALVKPTQTLTLTCTFSGFSLSTPGMGVWWIRQPPGKALEWLADIWWDDNKYTNPSLKSRLTISKDTSKNQVVLTMTNMDPVDTATYYCARRANYGNPYYAQDYWGQGTTVTVSSASTKGPSVFPLAPSSKSTSGGTAALGCLVKDYFPEPVTVSWNSGALTSGVHTFPAVLQSSGLYSLSSVVTVPSSSLGTQTYICNVNHKPSNTKVDKKVEPKSCDKTHTCPPCPAPEAAGGPSVFLFPPKPKDTLMISRTPEVTCVVVDVSHEDPEVKFNWYVDGVEVHNAKTKPREEQYNSTYRVVSVLTVLHQDWLNGKEYKCKVSNKALAAPIEKTISKAKGQPREPQVYTLPPSRDELTKNQVSLTCLVKGFYPSDIAVEWESNGQPENNYKTTPPVLDSDGSFFLYSKLTVDKSRWQQGNVFSCSVMHEALHNHYTQKSLSLSPGGGSGGSGGSGGSGGSTKKTQLQLEHLLLDLQMILNGINNYKNPELTRMLTAKFYMPKKATELKHLQCLEEELKPLEEVLNLAHSKNFHFDPRDVVSNINVFVLELKGSETTFMCEYADETATIVEFLNRWITFSQSIISTLTGGSGGGGSGGSGGSGGSGGGAELCDDDPPEIPHATFKAMAYKEGTMLNCECKRGFRRIKSGSLYMLCTGNSSHSSWDNQCQCTSSATRNTTKQVTPQPEEQKERKTTEMQSPMQPVDQASLPGHCREPPPWENEATERIYHFVVGQMVYYQCVQGYRALHRGPAESVCKMTHGKTRWTQPQLICTGE

SEQ ID NO: 571 - protein, 219 aa, Artificial Sequence; identical to SEQ ID NO: 276
  Made in Lab - Fusion construct

SEQ ID NO: 572 - protein, 783 aa, Artificial Sequence
  Made in Lab - Fusion construct
QVTLKESGPALVKPTQTLTLTCTFSGFSLSTSGMGVGWIRQPPGKALEWLADIWWDDNKYANPSLKSRLTISKDTSKNQVVLTMTNMDPVDTATYYCARRANYGNPYYAQDYWGQGTTVTVSSASTKGPSVFPLAPSSKSTSGGTAALGCLVKDYFPEPVTVSWNSGALTSGVHTFPAVLQSSGLYSLSSVVTVPSSSLGTQTYICNVNHKPSNTKVDKKVEPKSCDKTHTCPPCPAPEAAGGPSVFLFPPKPKDTLMISRTPEVTCVVVDVSHEDPEVKFNWYVDGVEVHNAKTKPREEQYNSTYRVVSVLTVLHQDWLNGKEYKCKVSNKALAAPIEKTISKAKGQPREPQVYTLPPSRDELTKNQVSLTCLVKGFYPSDIAVEWESNGQPENNYKTTPPVLDSDGSFFLYSKLTVDKSRWQQGNVFSCSVMHEALHNHYTQKSLSLSPGGGSPLGLAGGGSGGGGSTKKTQLQLEHLLLDLQMILNGINNYKNPKLTRMLTAEFYMPKKATELKHLQCLEKELKPLEEVLNLAQSKNFHLRPRDLISNINVIVLELKGSETTFMCEYADETATIVEFLNRWITFSQSIISTLTGGSGGPLGLAGSGRSDNRGGAELCDDDPPEIPHATFKAMAYKEGTMLNCKCKRGFRRIESGSLYMLCTGNSSHSSWDNQCQCTSSATRNTTKQVTPQPEEQKERKTTEMQSPMQPVDQASLPGHCREPPPWENEATERIYHFVVGQMVYYQCVQGYRALHRGPAESVCKMTHGKTRWTQPQLICTGE

SEQ ID NO: 573 - protein, 219 aa, Artificial Sequence; identical to SEQ ID NO: 312
  Made in Lab - Fusion construct

SEQ ID NO: 574 - protein, 783 aa, Artificial Sequence; identical to SEQ ID NO: 572
  Made in Lab - Fusion construct

SEQ ID NO: 575 - protein, 219 aa, Artificial Sequence; identical to SEQ ID NO: 314
  Made in Lab - Fusion construct

SEQ ID NO: 576 - protein, 781 aa, Artificial Sequence
  Made in Lab - Fusion construct
QVTLKESGPALVKPTQTLTLTCTFSGFSLSTSGMGVGWIRQPPGKALEWLADIWWDDNKYANPSLKSRLTISKDTSKNQVVLTMTNMDPVDTATYYCARRANYGNPYYAQDYWGQGTTVTVSSASTKGPSVFPLAPSSKSTSGGTAALGCLVKDYFPEPVTVSWNSGALTSGVHTFPAVLQSSGLYSLSSVVTVPSSSLGTQTYICNVNHKPSNTKVDKKVEPKSCDKTHTCPPCPAPEAAGGPSVFLFPPKPKDTLMISRTPEVTCVVVDVSHEDPEVKFNWYVDGVEVHNAKTKPREEQYNSTYRVVSVLTVLHQDWLNGKEYKCKVSNKALAAPIEKTISKAKGQPREPQVYTLPPSRDELTKNQVSLTCLVKGFYPSDIAVEWESNGQPENNYKTTPPVLDSDGSFFLYSKLTVDKSRWQQGNVFSCSVMHEALHNHYTQKSLSLSPGGGSPLGLAGGGSGGSTKKTQLQLEHLLLDLQMILNGINNYKNPELTRMLTAKFYMPKKATELKHLQCLEEELKPLEEVLNLAQSKNFHLRPRDLISNINVIVLELKGSETTFMCEYADETATIVEFLNRWITFSQSIISTLTGGSGGPLGLAGSGRSDNRGGAELCDDDPPEIPHATFKAMAYKEGTMLNCECKRGFRRIKSGSLYMLCTGNSSHSSWDNQCQCTSSATRNTTKQVTPQPEEQKERKTTEMQSPMQPVDQASLPGHCREPPPWENEATERIYHFVVGQMVYYQCVQGYRALHRGPAESVCKMTHGKTRWTQPQLICTGE

SEQ ID NO: 577 - protein, 219 aa, Artificial Sequence; identical to SEQ ID NO: 314
  Made in Lab - Fusion construct

SEQ ID NO: 578 - protein, 781 aa, Artificial Sequence
  Made in Lab - Fusion construct
QVTLKESGPALVKPTQTLTLTCTFSGFSLSTSGMGVGWIRQPPGKALEWLADIWWDDNKYANPSLKSRLTISKDTSKNQVVLTMTNMDPVDTATYYCARRANYGNPYYAQDYWGQGTTVTVSSASTKGPSVFPLAPSSKSTSGGTAALGCLVKDYFPEPVTVSWNSGALTSGVHTFPAVLQSSGLYSLSSVVTVPSSSLGTQTYICNVNHKPSNTKVDKKVEPKSCDKTHTCPPCPAPEAAGGPSVFLFPPKPKDTLMISRTPEVTCVVVDVSHEDPEVKFNWYVDGVEVHNAKTKPREEQYNSTYRVVSVLTVLHQDWLNGKEYKCKVSNKALAAPIEKTISKAKGQPREPQVYTLPPSRDELTKNQVSLTCLVKGFYPSDIAVEWESNGQPENNYKTTPPVLDSDGSFFLYSKLTVDKSRWQQGNVFSCSVMHEALHNHYTQKSLSLSPGGGSPLGLAGGGSGGSTKKTQLQLEHLLLDLQMILNGINNYKNPELTRMLTAKFAMPKKATELKHLQCLEEELKPLEEVLNLAQSKNFHLRPRDLISNINVIVLELKGSETTFMCEYADETATIVEFLNRWITFSQSIISTLTGGSGGPLGLAGSGRSDNRGGAELCDDDPPEIPHATFKAMAYKEGTMLNCECKRGFRRIKSGSLYMLCTGNSSHSSWDNQCQCTSSATRNTTKQVTPQPEEQKERKTTEMQSPMQPVDQASLPGHCREPPPWENEATERIYHFVVGQMVYYQCVQGYRALHRGPAESVCKMTHGKTRWTQPQLICTGE

SEQ ID NO: 579 - protein, 219 aa, Artificial Sequence; identical to SEQ ID NO: 314
  Made in Lab - Fusion construct

SEQ ID NO: 580 - protein, 783 aa, Artificial Sequence
  Made in Lab - Fusion construct
QVTLKESGPALVKPTQTLTLTCTFSGFSLSTPGMGVWWIRQPPGKALEWLADIWWDDNKYTNPSLKSRLTISKDTSKNQVVLTMTNMDPVDTATYYCARRANYGNPYYAQDYWGQGTTVTVSSASTKGPSVFPLAPSSKSTSGGTAALGCLVKDYFPEPVTVSWNSGALTSGVHTFPAVLQSSGLYSLSSVVTVPSSSLGTQTYICNVNHKPSNTKVDKKVEPKSCDKTHTCPPCPAPEAAGGPSVFLFPPKPKDTLMISRTPEVTCVVVDVSHEDPEVKFNWYVDGVEVHNAKTKPREEQYNSTYRVVSVLTVLHQDWLNGKEYKCKVSNKALAAPIEKTISKAKGQPREPQVYTLPPSRDELTKNQVSLTCLVKGFYPSDIAVEWESNGQPENNYKTTPPVLDSDGSFFLYSKLTVDKSRWQQGNVFSCSVMHEALHNHYTQKSLSLSPGGGSPLGLAGGGSGGGGSTKKTQLQLEHLLLDLQMILNGINNYKNPKLTRMLTAEFYMPKKATELKHLQCLEKELKPLEEVLNLAQSKNFHLRPRDLISNINVIVLELKGSETTFMCEYADETATIVEFLNRWITFSQSIISTLTGGSGGPLGLAGSGRSDNRGGAELCDDDPPEIPHATFKAMAYKEGTMLNCKCKRGFRRIESGSLYMLCTGNSSHSSWDNQCQCTSSATRNTTKQVTPQPEEQKERKTTEMQSPMQPVDQASLPGHCREPPPWENEATERIYHFVVGQMVYYQCVQGYRALHRGPAESVCKMTHGKTRWTQPQLICTGE

SEQ ID NO: 581 - protein, 219 aa, Artificial Sequence; identical to SEQ ID NO: 274
  Made in Lab - Fusion construct

SEQ ID NO: 582 - protein, 783 aa, Artificial Sequence; identical to SEQ ID NO: 580
  Made in Lab - Fusion construct

SEQ ID NO: 583 - protein, 219 aa, Artificial Sequence; identical to SEQ ID NO: 276
  Made in Lab - Fusion construct

SEQ ID NO: 584 - protein, 783 aa, Artificial Sequence; identical to SEQ ID NO: 580
  Made in Lab - Fusion construct

SEQ ID NO: 585 - protein, 219 aa, Artificial Sequence; identical to SEQ ID NO: 312
  Made in Lab - Fusion construct

SEQ ID NO: 586 - protein, 783 aa, Artificial Sequence; identical to SEQ ID NO: 580
  Made in Lab - Fusion construct

SEQ ID NO: 587 - protein, 219 aa, Artificial Sequence; identical to SEQ ID NO: 314
  Made in Lab - Fusion construct

SEQ ID NO: 588 - protein, 781 aa, Artificial Sequence
  Made in Lab - Fusion construct
QVTLKESGPALVKPTQTLTLTCTFSGFSLSTPGMGVWWIRQPPGKALEWLADIWWDDNKYTNPSLKSRLTISKDTSKNQVVLTMTNMDPVDTATYYCARRANYGNPYYAQDYWGQGTTVTVSSASTKGPSVFPLAPSSKSTSGGTAALGCLVKDYFPEPVTVSWNSGALTSGVHTFPAVLQSSGLYSLSSVVTVPSSSLGTQTYICNVNHKPSNTKVDKKVEPKSCDKTHTCPPCPAPEAAGGPSVFLFPPKPKDTLMISRTPEVTCVVVDVSHEDPEVKFNWYVDGVEVHNAKTKPREEQYNSTYRVVSVLTVLHQDWLNGKEYKCKVSNKALAAPIEKTISKAKGQPREPQVYTLPPSRDELTKNQVSLTCLVKGFYPSDIAVEWESNGQPENNYKTTPPVLDSDGSFFLYSKLTVDKSRWQQGNVFSCSVMHEALHNHYTQKSLSLSPGGGSPLGLAGGGSGGSTKKTQLQLEHLLLDLQMILNGINNYKNPELTRMLTAKFYMPKKATELKHLQCLEEELKPLEEVLNLAQSKNFHLRPRDLISNINVIVLELKGSETTFMCEYADETATIVEFLNRWITFSQSIISTLTGGSGGPLGLAGSGRSDNRGGAELCDDDPPEIPHATFKAMAYKEGTMLNCECKRGFRRIKSGSLYMLCTGNSSHSSWDNQCQCTSSATRNTTKQVTPQPEEQKERKTTEMQSPMQPVDQASLPGHCREPPPWENEATERIYHFVVGQMVYYQCVQGYRALHRGPAESVCKMTHGKTRWTQPQLICTGE

SEQ ID NO: 589 - protein, 219 aa, Artificial Sequence; identical to SEQ ID NO: 276
  Made in Lab - Fusion construct

SEQ ID NO: 590 - protein, 781 aa, Artificial Sequence
  Made in Lab - Fusion construct
QVTLKESGPALVKPTQTLTLTCTFSGFSLSTPGMGVWWIRQPPGKALEWLADIWWDDNKYTNPSLKSRLTISKDTSKNQVVLTMTNMDPVDTATYYCARRANYGNPYYAQDYWGQGTTVTVSSASTKGPSVFPLAPSSKSTSGGTAALGCLVKDYFPEPVTVSWNSGALTSGVHTFPAVLQSSGLYSLSSVVTVPSSSLGTQTYICNVNHKPSNTKVDKKVEPKSCDKTHTCPPCPAPEAAGGPSVFLFPPKPKDTLMISRTPEVTCVVVDVSHEDPEVKFNWYVDGVEVHNAKTKPREEQYNSTYRVVSVLTVLHQDWLNGKEYKCKVSNKALAAPIEKTISKAKGQPREPQVYTLPPSRDELTKNQVSLTCLVKGFYPSDIAVEWESNGQPENNYKTTPPVLDSDGSFFLYSKLTVDKSRWQQGNVFSCSVMHEALHNHYTQKSLSLSPGGGSPLGLAGGGSGGSTKKTQLQLEHLLLDLQMILNGINNYKNPELTRMLTAKFAMPKKATELKHLQCLEEELKPLEEVLNLAQSKNFHLRPRDLISNINVIVLELKGSETTFMCEYADETATIVEFLNRWITFSQSIISTLTGGSGGPLGLAGSGRSDNRGGAELCDDDPPEIPHATFKAMAYKEGTMLNCECKRGFRRIKSGSLYMLCTGNSSHSSWDNQCQCTSSATRNTTKQVTPQPEEQKERKTTEMQSPMQPVDQASLPGHCREPPPWENEATERIYHFVVGQMVYYQCVQGYRALHRGPAESVCKMTHGKTRWTQPQLICTGE

SEQ ID NO: 591 - protein, 219 aa, Artificial Sequence; identical to SEQ ID NO: 276
  Made in Lab - Fusion construct

SEQ ID NO: 592 - protein, 787 aa, Artificial Sequence
  Made in Lab - Fusion construct
QVTLKESGPALVKPTQTLTLTCTFSGFSLSTSGMGVGWIRQPPGKALEWLADIWWDDNKYANPSLKSRLTISKDTSKNQVVLTMTNMDPVDTATYYCARRANYGNPYYAQDYWGQGTTVTVSSASTKGPSVFPLAPSSKSTSGGTAALGCLVKDYFPEPVTVSWNSGALTSGVHTFPAVLQSSGLYSLSSVVTVPSSSLGTQTYICNVNHKPSNTKVDKKVEPKSCDKTHTCPPCPAPEAAGGPSVFLFPPKPKDTLMISRTPEVTCVVVDVSHEDPEVKFNWYVDGVEVHNAKTKPREEQYNSTYRVVSVLTVLHQDWLNGKEYKCKVSNKALAAPIEKTISKAKGQPREPQVYTLPPSRDELTKNQVSLTCLVKGFYPSDIAVEWESNGQPENNYKTTPPVLDSDGSFFLYSKLTVDKSRWQQGNVFSCSVMHEALHNHYTQKSLSLSPGGGSGGSPLGLAGGGSGGSGGSTKKTQLQLEHLLLDLQMILNGINNYKNPKLTRMLTAEFYMPKKATELKHLQCLEKELKPLEEVLNLAQSKNFHLRPRDLISNINVIVLELKGSETTFMCEYADETATIVEFLNRWITFSQSIISTLTGGSGGPLGLAGSGRSDNRGGAELCDDDPPEIPHATFKAMAYKEGTMLNCKCKRGFRRIESGSLYMLCTGNSSHSSWDNQCQCTSSATRNTTKQVTPQPEEQKERKTTEMQSPMQPVDQASLPGHCREPPPWENEATERIYHFVVGQMVYYQCVQGYRALHRGPAESVCKMTHGKTRWTQPQLICTGE

SEQ ID NO: 593 - protein, 219 aa, Artificial Sequence; identical to SEQ ID NO: 312
  Made in Lab - Fusion construct

SEQ ID NO: 594 - protein, 787 aa, Artificial Sequence; identical to SEQ ID NO: 592
  Made in Lab - Fusion construct

SEQ ID NO: 595 - protein, 219 aa, Artificial Sequence; identical to SEQ ID NO: 314
  Made in Lab - Fusion construct

SEQ ID NO: 596 - protein, 787 aa, Artificial Sequence
  Made in Lab - Fusion construct
QVTLKESGPALVKPTQTLTLTCTFSGFSLSTPGMGVWWIRQPPGKALEWLADIWWDDNKYTNPSLKSRLTISKDTSKNQVVLTMTNMDPVDTATYYCARRANYGNPYYAQDYWGQGTTVTVSSASTKGPSVFPLAPSSKSTSGGTAALGCLVKDYFPEPVTVSWNSGALTSGVHTFPAVLQSSGLYSLSSVVTVPSSSLGTQTYICNVNHKPSNTKVDKKVEPKSCDKTHTCPPCPAPEAAGGPSVFLFPPKPKDTLMISRTPEVTCVVVDVSHEDPEVKFNWYVDGVEVHNAKTKPREEQYNSTYRVVSVLTVLHQDWLNGKEYKCKVSNKALAAPIEKTISKAKGQPREPQVYTLPPSRDELTKNQVSLTCLVKGFYPSDIAVEWESNGQPENNYKTTPPVLDSDGSFFLYSKLTVDKSRWQQGNVFSCSVMHEALHNHYTQKSLSLSPGGGSGGSPLGLAGGGSGGSGGSTKKTQLQLEHLLLDLQMILNGINNYKNPKLTRMLTAEFYMPKKATELKHLQCLEKELKPLEEVLNLAQSKNFHLRPRDLISNINVIVLELKGSETTFMCEYADETATIVEFLNRWITFSQSIISTLTGGSGGPLGLAGSGRSDNRGGAELCDDDPPEIPHATFKAMAYKEGTMLNCKCKRGFRRIESGSLYMLCTGNSSHSSWDNQCQCTSSATRNTTKQVTPQPEEQKERKTTEMQSPMQPVDQASLPGHCREPPPWENEATERIYHFVVGQMVYYQCVQGYRALHRGPAESVCKMTHGKTRWTQPQLICTGE

SEQ ID NO: 597 - protein, 219 aa, Artificial Sequence; identical to SEQ ID NO: 274
  Made in Lab - Fusion construct

SEQ ID NO: 598 - protein, 787 aa, Artificial Sequence; identical to SEQ ID NO: 596
  Made in Lab - Fusion construct

SEQ ID NO: 599 - protein, 219 aa, Artificial Sequence; identical to SEQ ID NO: 276
  Made in Lab - Fusion construct

SEQ ID NO: 600 - protein, 787 aa, Artificial Sequence; identical to SEQ ID NO: 596
  Made in Lab - Fusion construct

SEQ ID NO: 601 - protein, 219 aa, Artificial Sequence; identical to SEQ ID NO: 312
  Made in Lab - Fusion construct

SEQ ID NO: 602 - protein, 787 aa, Artificial Sequence; identical to SEQ ID NO: 596
  Made in Lab - Fusion construct

SEQ ID NO: 603 - protein, 219 aa, Artificial Sequence; identical to SEQ ID NO: 314
  Made in Lab - Fusion construct

SEQ ID NO: 604 - protein, 683 aa, Artificial Sequence
  Made in Lab - Fusion construct
QVTLKESGPALVKPTQTLTLTCTFSGFSLSTSGMGVGWIRQPPGKALEWLADIWWDDNKYANPSLKSRLTISKDTSKNQVVLTMTNMDPVDTATYYCARRANYGNPYYAQDYWGQGTTVTVSSASTKGPSVFPLAPSSKSTSGGTAALGCLVKDYFPEPVTVSWNSGALTSGVHTFPAVLQSSGLYSLSSVVTVPSSSLGTQTYICNVNHKPSNTKVDKKVEPKSCDKTHTCPPCPAPEAAGGPSVFLFPPKPKDTLMISRTPEVTCVVVDVSHEDPEVKFNWYVDGVEVHNAKTKPREEQYNSTYRVVSVLTVLHQDWLNGKEYKCKVSNKALAAPIEKTISKAKGQPREPQVYTLPPSRDELTKNQVSLTCLVKGFYPSDIAVEWESNGQPENNYKTTPPVLDSDGSFFLYSKLTVDKSRWQQGNVFSCSVMHEALHNHYTQKSLSLSPGPLGLAGSGRSDNRGSNWVNVISDLKKIEDLIQSMHIDATLYTESDVHPSCKVTAMKCFLLELQDISLESGDASIHDTVENLIILANNSLSSNGNVTESGCKECEELEEKNIKEFLQSFVHIVQMFINTAGGGSGGGSGGGSGGGSGGGSGGGSIACPPPMSVEHADIWVKSYSLYSRERYICNSGFKRKAGTSSLTECVLNKATNVAHWTTPSLKCIRDPALVHQRPAPPS

SEQ ID NO: 605 - protein, 219 aa, Artificial Sequence; identical to SEQ ID NO: 272
  Made in Lab - Fusion construct

SEQ ID NO: 606 - protein, 685 aa, Artificial Sequence
  Made in Lab - Fusion construct
QVTLKESGPALVKPTQTLTLTCTFSGFSLSTSGMGVGWIRQPPGKALEWLADIWWDDNKYANPSLKSRLTISKDTSKNQVVLTMTNMDPVDTATYYCARRANYGNPYYAQDYWGQGTTVTVSSASTKGPSVFPLAPSSKSTSGGTAALGCLVKDYFPEPVTVSWNSGALTSGVHTFPAVLQSSGLYSLSSVVTVPSSSLGTQTYICNVNHKPSNTKVDKKVEPKSCDKTHTCPPCPAPEAAGGPSVFLFPPKPKDTLMISRTPEVTCVVVDVSHEDPEVKFNWYVDGVEVHNAKTKPREEQYNSTYRVVSVLTVLHQDWLNGKEYKCKVSNKALAAPIEKTISKAKGQPREPQVYTLPPSRDELTKNQVSLTCLVKGFYPSDIAVEWESNGQPENNYKTTPPVLDSDGSFFLYSKLTVDKSRWQQGNVFSCSVMHEALHNHYTQKSLSLSPGPLGLAGSGRSDNRGGGSNWVNVISDLKKIEDLIQSMHIDATLYTESDVHPSCKVTAMKCFLLELQDISLESGDASIHDTVENLIILANNSLSSNGNVTESGCKECEELEEKNIKEFLQSFVHIVQMFINTAGGGSGGGSGGGSGGGSGGGSGGGSIACPPPMSVEHADIWVKSYSLYSRERYICNSGFKRKAGTSSLTECVLNKATNVAHWTTPSLKCIRDPALVHQRPAPPS

SEQ ID NO: 607 - protein, 219 aa, Artificial Sequence; identical to SEQ ID NO: 272
  Made in Lab - Fusion construct

SEQ ID NO: 608 - protein, 685 aa, Artificial Sequence
  Made in Lab - Fusion construct
QVTLKESGPALVKPTQTLTLTCTFSGFSLSTSGMGVGWIRQPPGKALEWLADIWWDDNKYANPSLKSRLTISKDTSKNQVVLTMTNMDPVDTATYYCARRANYGNPYYAQDYWGQGTTVTVSSASTKGPSVFPLAPSSKSTSGGTAALGCLVKDYFPEPVTVSWNSGALTSGVHTFPAVLQSSGLYSLSSVVTVPSSSLGTQTYICNVNHKPSNTKVDKKVEPKSCDKTHTCPPCPAPEAAGGPSVFLFPPKPKDTLMISRTPEVTCVVVDVSHEDPEVKFNWYVDGVEVHNAKTKPREEQYNSTYRVVSVLTVLHQDWLNGKEYKCKVSNKALAAPIEKTISKAKGQPREPQVYTLPPSRDELTKNQVSLTCLVKGFYPSDIAVEWESNGQPENNYKTTPPVLDSDGSFFLYSKLTVDKSRWQQGNVFSCSVMHEALHNHYTQKSLSLSPGPLGLAGSGRSDNRGGGSNWVNVISDLKKIEDLIQSMHIDATLYTESDVHPSCKVTAMKCFLLELQDISLESGDASIHDTVENLIILANNSLSSNGNVTESGCFECEELEEKNIKEFLQSFVHIVQMFINTAGGGSGGGSGGGSGGGSGGGSGGGSIACPPPMSVEHADIWVKSYSLYSRERYICNSGFKRKAGTSSLTECVLNKATNVAHWTTPSLKCIRDPALVHQRPAPPS

SEQ ID NO: 609 - protein, 219 aa, Artificial Sequence; identical to SEQ ID NO: 272
  Made in Lab - Fusion construct

SEQ ID NO: 610 - protein, 685 aa, Artificial Sequence
  Made in Lab - Fusion construct
QVTLKESGPALVKPTQTLTLTCTFSGFSLSTSGMGVGWIRQPPGKALEWLADIWWDDNKYANPSLKSRLTISKDTSKNQVVLTMTNMDPVDTATYYCARRANYGNPYYAQDYWGQGTTVTVSSASTKGPSVFPLAPSSKSTSGGTAALGCLVKDYFPEPVTVSWNSGALTSGVHTFPAVLQSSGLYSLSSVVTVPSSSLGTQTYICNVNHKPSNTKVDKKVEPKSCDKTHTCPPCPAPEAAGGPSVFLFPPKPKDTLMISRTPEVTCVVVDVSHEDPEVKFNWYVDGVEVHNAKTKPREEQYNSTYRVVSVLTVLHQDWLNGKEYKCKVSNKALAAPIEKTISKAKGQPREPQVYTLPPSRDELTKNQVSLTCLVKGFYPSDIAVEWESNGQPENNYKTTPPVLDSDGSFFLYSKLTVDKSRWQQGNVFSCSVMHEALHNHYTQKSLSLSPGPLGLAGSGRSDNRGGGSNWVNVISDLKKIEDLIQSMHIDATLYTESDVHPSCKVTAMKCFLLELQDISLESGDASIHDTVENLIILANNSLSSNGNVTESGCGECEELEEKNIKEFLQSFVHIVQMFINTAGGGSGGGSGGGSGGGSGGGSGGGSIACPPPMSVEHADIWVKSYSLYSRERYICNSGFKRKAGTSSLTECVLNKATNVAHWTTPSLKCIRDPALVHQRPAPPS

SEQ ID NO: 611 - protein, 219 aa, Artificial Sequence; identical to SEQ ID NO: 272
  Made in Lab - Fusion construct

SEQ ID NO: 612 - protein, 685 aa, Artificial Sequence; identical to SEQ ID NO: 610
  Made in Lab - Fusion construct

SEQ ID NO: 613 - protein, 219 aa, Artificial Sequence; identical to SEQ ID NO: 274
  Made in Lab - Fusion construct

SEQ ID NO: 614 - protein, 685 aa, Artificial Sequence; identical to SEQ ID NO: 610
  Made in Lab - Fusion construct

SEQ ID NO: 615 - protein, 219 aa, Artificial Sequence; identical to SEQ ID NO: 276
  Made in Lab - Fusion construct

SEQ ID NO: 616 - protein, 685 aa, Artificial Sequence; identical to SEQ ID NO: 610
  Made in Lab - Fusion construct

SEQ ID NO: 617 - protein, 219 aa, Artificial Sequence; identical to SEQ ID NO: 312
  Made in Lab - Fusion construct

SEQ ID NO: 618 - protein, 685 aa, Artificial Sequence; identical to SEQ ID NO: 610
  Made in Lab - Fusion construct

SEQ ID NO: 619 - protein, 219 aa, Artificial Sequence; identical to SEQ ID NO: 314
  Made in Lab - Fusion construct

SEQ ID NO: 620 - protein, 687 aa, Artificial Sequence
  Made in Lab - Fusion construct
QVTLKESGPALVKPTQTLTLTCTFSGFSLSTSGMGVGWIRQPPGKALEWLADIWWDDNKYANPSLKSRLTISKDTSKNQVVLTMTNMDPVDTATYYCARRANYGNPYYAQDYWGQGTTVTVSSASTKGPSVFPLAPSSKSTSGGTAALGCLVKDYFPEPVTVSWNSGALTSGVHTFPAVLQSSGLYSLSSVVTVPSSSLGTQTYICNVNHKPSNTKVDKKVEPKSCDKTHTCPPCPAPEAAGGPSVFLFPPKPKDTLMISRTPEVTCVVVDVSHEDPEVKFNWYVDGVEVHNAKTKPREEQYNSTYRVVSVLTVLHQDWLNGKEYKCKVSNKALAAPIEKTISKAKGQPREPQVYTLPPSRDELTKNQVSLTCLVKGFYPSDIAVEWESNGQPENNYKTTPPVLDSDGSFFLYSKLTVDKSRWQQGNVFSCSVMHEALHNHYTQKSLSLSPGGSPLGLAGSGRSDNRGGGSNWVNVISDLKKIEDLIQSMHIDATLYTESDVHPSCKVTAMKCFLLELQDISLESGDASIHDTVENLIILANNSLSSNGNVTESGCKECEELEEKNIKEFLQSFVHIVQMFINTAGGGSGGGSGGGSGGGSGGGSGGGSIACPPPMSVEHADIWVKSYSLYSRERYICNSGFKRKAGTSSLTECVLNKATNVAHWTTPSLKCIRDPALVHQRPAPPS

SEQ ID NO: 621 - protein, 219 aa, Artificial Sequence; identical to SEQ ID NO: 272
  Made in Lab - Fusion construct

SEQ ID NO: 622 - protein, 687 aa, Artificial Sequence; identical to SEQ ID NO: 620
  Made in Lab - Fusion construct

SEQ ID NO: 623 - protein, 219 aa, Artificial Sequence; identical to SEQ ID NO: 274
  Made in Lab - Fusion construct

SEQ ID NO: 624 - protein, 687 aa, Artificial Sequence; identical to SEQ ID NO: 620
  Made in Lab - Fusion construct

SEQ ID NO: 625 - protein, 219 aa, Artificial Sequence; identical to SEQ ID NO: 276
  Made in Lab - Fusion construct

SEQ ID NO: 626 - protein, 685 aa, Artificial Sequence
  Made in Lab - Fusion construct
QVTLKESGPALVKPTQTLTLTCTFSGFSLSTSGMGVGWIRQPPGKALEWLADIWWDDNKYANPSLKSRLTISKDTSKNQVVLTMTNMDPVDTATYYCARRANYGNPYYAQDYWGQGTTVTVSSASTKGPSVFPLAPSSKSTSGGTAALGCLVKDYFPEPVTVSWNSGALTSGVHTFPAVLQSSGLYSLSSVVTVPSSSLGTQTYICNVNHKPSNTKVDKKVEPKSCDKTHTCPPCPAPEAAGGPSVFLFPPKPKDTLMISRTPEVTCVVVDVSHEDPEVKFNWYVDGVEVHNAKTKPREEQYNSTYRVVSVLTVLHQDWLNGKEYKCKVSNKALAAPIEKTISKAKGQPREPQVYTLPPSRDELTKNQVSLTCLVKGFYPSDIAVEWESNGQPENNYKTTPPVLDSDGSFFLYSKLTVDKSRWQQGNVFSCSVMHEALHNHYTQKSLSLSPGGGGGSGGGSGGGSGGGSNWVNVISDLKKIEDLIQSMHIDATLYTESDVHPSCKVTAMKCFLLELQDISLESGDASIHDTVENLIILANNSLSSNGNVTESGCGECEELEEKNIKEFLQSFVHIVQMFINTAGGGSGGGSGGGSGGGSGGGSGGGSIACPPPMSVEHADIWVKSYSLYSRERYICNSGFKRKAGTSSLTECVLNKATNVAHWTTPSLKCIRDPALVHQRPAPPS

SEQ ID NO: 627 - protein, 219 aa, Artificial Sequence; identical to SEQ ID NO: 272
  Made in Lab - Fusion construct

SEQ ID NO: 628 - protein, 685 aa, Artificial Sequence
  Made in Lab - Fusion construct
QVTLKESGPALVKPTQTLTLTCTFSGFSLSTPGMGVWWIRQPPGKALEWLADIWWDDNKYTNPSLKSRLTISKDTSKNQVVLTMTNMDPVDTATYYCARRANYGNPYYAQDYWGQGTTVTVSSASTKGPSVFPLAPSSKSTSGGTAALGCLVKDYFPEPVTVSWNSGALTSGVHTFPAVLQSSGLYSLSSVVTVPSSSLGTQTYICNVNHKPSNTKVDKKVEPKSCDKTHTCPPCPAPEAAGGPSVFLFPPKPKDTLMISRTPEVTCVVVDVSHEDPEVKFNWYVDGVEVHNAKTKPREEQYNSTYRVVSVLTVLHQDWLNGKEYKCKVSNKALAAPIEKTISKAKGQPREPQVYTLPPSRDELTKNQVSLTCLVKGFYPSDIAVEWESNGQPENNYKTTPPVLDSDGSFFLYSKLTVDKSRWQQGNVFSCSVMHEALHNHYTQKSLSLSPGPLGLAGSGRSDNRGGGSNWVNVISDLKKIEDLIQSMHIDATLYTESDVHPSCKVTAMKCFLLELQDISLESGDASIHDTVENLIILANNSLSSNGNVTESGCGECEELEEKNIKEFLQSFVHIVQMFINTAGGGSGGGSGGGSGGGSGGGSGGGSIACPPPMSVEHADIWVKSYSLYSRERYICNSGFKRKAGTSSLTECVLNKATNVAHWTTPSLKCIRDPALVHQRPAPPS

SEQ ID NO: 629 - protein, 219 aa, Artificial Sequence; identical to SEQ ID NO: 276
  Made in Lab - Fusion construct

SEQ ID NO: 630 - protein, 685 aa, Artificial Sequence
  Made in Lab - Fusion construct
QVTLKESGPALVKPTQTLTLTCTFSGFSLSTPGMGVWWIRQPPGKALEWLADIWWDDNKYTNPSLKSRLTISKDTSKNQVVLTMTNMDPVDTATYYCARRANYGNPYYAQDYWGQGTTVTVSSASTKGPSVFPLAPSSKSTSGGTAALGCLVKDYFPEPVTVSWNSGALTSGVHTFPAVLQSSGLYSLSSVVTVPSSSLGTQTYICNVNHKPSNTKVDKKVEPKSCDKTHTCPPCPAPEAAGGPSVFLFPPKPKDTLMISRTPEVTCVVVDVSHEDPEVKFNWYVDGVEVHNAKTKPREEQYNSTYRVVSVLTVLHQDWLNGKEYKCKVSNKALAAPIEKTISKAKGQPREPQVYTLPPSRDELTKNQVSLTCLVKGFYPSDIAVEWESNGQPENNYKTTPPVLDSDGSFFLYSKLTVDKSRWQQGNVFSCSVMHEALHNHYTQKSLSLSPGGGGGSGGGSGGGSGGGSNWVNVISDLKKIEDLIQSMHIDATLYTESDVHPSCKVTAMKCFLLELQDISLESGDASIHDTVENLIILANNSLSSNGNVTESGCGECEELEEKNIKEFLQSFVHIVQMFINTAGGGSGGGSGGGSGGGSGGGSGGGSIACPPPMSVEHADIWVKSYSLYSRERYICNSGFKRKAGTSSLTECVLNKATNVAHWTTPSLKCIRDPALVHQRPAPPS

SEQ ID NO: 631 - protein, 219 aa, Artificial Sequence; identical to SEQ ID NO: 276
  Made in Lab - Fusion construct

SEQ ID NO: 632 - protein, 583 aa, Artificial Sequence
  Made in Lab - Fusion construct
QVTLKESGPALVKPTQTLTLTCTFSGFSLSTSGMGVGWIRQPPGKALEWLADIWWDDNKYANPSLKSRLTISKDTSKNQVVLTMTNMDPVDTATYYCARRANYGNPYYAQDYWGQGTTVTVSSASTKGPSVFPLAPSSKSTSGGTAALGCLVKDYFPEPVTVSWNSGALTSGVHTFPAVLQSSGLYSLSSVVTVPSSSLGTQTYICNVNHKPSNTKVDKKVEPKSCDKTHTCPPCPAPEAAGGPSVFLFPPKPKDTLMISRTPEVTCVVVDVSHEDPEVKFNWYVDGVEVHNAKTKPREEQYNSTYRVVSVLTVLHQDWLNGKEYKCKVSNKALAAPIEKTISKAKGQPREPQVYTLPPSRDELTKNQVSLTCLVKGFYPSDIAVEWESNGQPENNYKTTPPVLDSDGSFFLYSKLTVDKSRWQQGNVFSCSVMHEALHNHYTQKSLSLSPGPLGLAGSGRSDNRGGGSNWVNVISDLKKIEDLIQSMHIDATLYTESDVHPSCKVTAMKCFLLELQDISLESGDASIHDTVENLIILANNSLSSNGNVTESGCGECEELEEKNIKEFLQSFVHIVQMFINTA

SEQ ID NO: 633 - protein, 219 aa, Artificial Sequence; identical to SEQ ID NO: 272
  Made in Lab - Fusion construct

SEQ ID NO: 634 - protein, 685 aa, Artificial Sequence
  Made in Lab - Fusion construct
QVTLKESGPALVKPTQTLTLTCTFSGFSLSTSGMGVGWIRQPPGKALEWLADIWWDDNKYANPSLKSRLTISKDTSKNQVVLTMTNMDPVDTATYYCARRANYGNPYYAQDYWGQGTTVTVSSASTKGPSVFPLAPSSKSTSGGTAALGCLVKDYFPEPVTVSWNSGALTSGVHTFPAVLQSSGLYSLSSVVTVPSSSLGTQTYICNVNHKPSNTKVDKKVEPKSCDKTHTCPPCPAPEAAGGPSVFLFPPKPKDTLMISRTPEVTCVVVDVSHEDPEVKFNWYVDGVEVHNAKTKPREEQYNSTYRVVSVLTVLHQDWLNGKEYKCKVSNKALAAPIEKTISKAKGQPREPQVYTLPPSRDELTKNQVSLTCLVKGFYPSDIAVEWESNGQPENNYKTTPPVLDSDGSFFLYSKLTVDKSRWQQGNVFSCSVMHEALHNHYTQKSLSLSPGPLGLAGSGRSDNRGGGSNWVNVISDLKKIEDLIQSMHIDATLYTESDVHPSCKVTAMKCFLLELQDISLESGDASIHDTVENLIILANNSLSSAGNVTESGCGECEELEEKNIKEFLQSFVHIVQMFINTAGGGSGGGSGGGSGGGSGGGSGGGSIACPPPMSVEHADIWVKSYSLYSRERYICNSGFKRKAGTSSLTECVLNKATNVAHWTTPSLKCIRDPALVHQRPAPPS

SEQ ID NO: 635 - protein, 219 aa, Artificial Sequence; identical to SEQ ID NO: 274
  Made in Lab - Fusion construct

SEQ ID NO: 636 - protein, 685 aa, Artificial Sequence; identical to SEQ ID NO: 634
  Made in Lab - Fusion construct

SEQ ID NO: 637 - protein, 219 aa, Artificial Sequence; identical to SEQ ID NO: 276
  Made in Lab - Fusion construct

SEQ ID NO: 638 - protein, 685 aa, Artificial Sequence; identical to SEQ ID NO: 634
  Made in Lab - Fusion construct

SEQ ID NO: 639 - protein, 219 aa, Artificial Sequence; identical to SEQ ID NO: 312
  Made in Lab - Fusion construct

SEQ ID NO: 640 - protein, 685 aa, Artificial Sequence; identical to SEQ ID NO: 634
  Made in Lab - Fusion construct

SEQ ID NO: 641 - protein, 219 aa, Artificial Sequence; identical to SEQ ID NO: 314
  Made in Lab - Fusion construct

SEQ ID NO: 642 - protein, 685 aa, Artificial Sequence
  Made in Lab - Fusion construct
QVTLKESGPALVKPTQTLTLTCTFSGFSLSTPGMGVWWIRQPPGKALEWLADIWWDDNKYTNPSLKSRLTISKDTSKNQVVLTMTNMDPVDTATYYCARRANYGNPYYAQDYWGQGTTVTVSSASTKGPSVFPLAPSSKSTSGGTAALGCLVKDYFPEPVTVSWNSGALTSGVHTFPAVLQSSGLYSLSSVVTVPSSSLGTQTYICNVNHKPSNTKVDKKVEPKSCDKTHTCPPCPAPEAAGGPSVFLFPPKPKDTLMISRTPEVTCVVVDVSHEDPEVKFNWYVDGVEVHNAKTKPREEQYNSTYRVVSVLTVLHQDWLNGKEYKCKVSNKALAAPIEKTISKAKGQPREPQVYTLPPSRDELTKNQVSLTCLVKGFYPSDIAVEWESNGQPENNYKTTPPVLDSDGSFFLYSKLTVDKSRWQQGNVFSCSVMHEALHNHYTQKSLSLSPGPLGLAGSGRSDNRGGGSNWVNVISDLKKIEDLIQSMHIDATLYTESDVHPSCKVTAMKCFLLELQDISLESGDASIHDTVENLIILANNSLSSAGNVTESGCGECEELEEKNIKEFLQSFVHIVQMFINTAGGGSGGGSGGGSGGGSGGGSGGGSIACPPPMSVEHADIWVKSYSLYSRERYICNSGFKRKAGTSSLTECVLNKATNVAHWTTPSLKCIRDPALVHQRPAPPS

SEQ ID NO: 643 - protein, 219 aa, Artificial Sequence; identical to SEQ ID NO: 276
  Made in Lab - Fusion construct

SEQ ID NO: 644 - protein, 685 aa, Artificial Sequence; identical to SEQ ID NO: 642
  Made in Lab - Fusion construct

SEQ ID NO: 645 - protein, 219 aa, Artificial Sequence; identical to SEQ ID NO: 312
  Made in Lab - Fusion construct

SEQ ID NO: 646 - protein, 685 aa, Artificial Sequence; identical to SEQ ID NO: 642
  Made in Lab - Fusion construct

SEQ ID NO: 647 - protein, 219 aa, Artificial Sequence; identical to SEQ ID NO: 314
  Made in Lab - Fusion construct

SEQ ID NO: 648 - protein, 687 aa, Artificial Sequence
  Made in Lab - Fusion construct
QVTLKESGPALVKPTQTLTLTCTFSGFSLSTSGMGVGWIRQPPGKALEWLADIWWDDNKYANPSLKSRLTISKDTSKNQVVLTMTNMDPVDTATYYCARRANYGNPYYAQDYWGQGTTVTVSSASTKGPSVFPLAPSSKSTSGGTAALGCLVKDYFPEPVTVSWNSGALTSGVHTFPAVLQSSGLYSLSSVVTVPSSSLGTQTYICNVNHKPSNTKVDKKVEPKSCDKTHTCPPCPAPEAAGGPSVFLFPPKPKDTLMISRTPEVTCVVVDVSHEDPEVKFNWYVDGVEVHNAKTKPREEQYNSTYRVVSVLTVLHQDWLNGKEYKCKVSNKALAAPIEKTISKAKGQPREPQVYTLPPSRDELTKNQVSLTCLVKGFYPSDIAVEWESNGQPENNYKTTPPVLDSDGSFFLYSKLTVDKSRWQQGNVFSCSVMHEALHNHYTQKSLSLSPGGSPLGLAGSGRSDNRGGGSNWVNVISDLKKIEDLIQSMHIDATLYTESDVHPSCKVTAMKCFLLELQDISLESGDASIHDTVENLIILANNSLSSAGNVTESGCGECEELEEKNIKEFLQSFVHIVQMFINTAGGGSGGGSGGGSGGGSGGGSGGGSIACPPPMSVEHADIWVKSYSLYSRERYICNSGFKRKAGTSSLTECVLNKATNVAHWTTPSLKCIRDPALVHQRPAPPS

SEQ ID NO: 649 - protein, 219 aa, Artificial Sequence; identical to SEQ ID NO: 274
  Made in Lab - Fusion construct

SEQ ID NO: 650 - protein, 687 aa, Artificial Sequence
  Made in Lab - Fusion construct
QVTLKESGPALVKPTQTLTLTCTFSGFSLSTPGMGVWWIRQPPGKALEWLADIWWDDNKYTNPSLKSRLTISKDTSKNQVVLTMTNMDPVDTATYYCARRANYGNPYYAQDYWGQGTTVTVSSASTKGPSVFPLAPSSKSTSGGTAALGCLVKDYFPEPVTVSWNSGALTSGVHTFPAVLQSSGLYSLSSVVTVPSSSLGTQTYICNVNHKPSNTKVDKKVEPKSCDKTHTCPPCPAPEAAGGPSVFLFPPKPKDTLMISRTPEVTCVVVDVSHEDPEVKFNWYVDGVEVHNAKTKPREEQYNSTYRVVSVLTVLHQDWLNGKEYKCKVSNKALAAPIEKTISKAKGQPREPQVYTLPPSRDELTKNQVSLTCLVKGFYPSDIAVEWESNGQPENNYKTTPPVLDSDGSFFLYSKLTVDKSRWQQGNVFSCSVMHEALHNHYTQKSLSLSPGGSPLGLAGSGRSDNRGGGSNWVNVISDLKKIEDLIQSMHIDATLYTESDVHPSCKVTAMKCFLLELQDISLESGDASIHDTVENLIILANNSLSSAGNVTESGCGECEELEEKNIKEFLQSFVHIVQMFINTAGGGSGGGSGGGSGGGSGGGSGGGSIACPPPMSVEHADIWVKSYSLYSRERYICNSGFKRKAGTSSLTECVLNKATNVAHWTTPSLKCIRDPALVHQRPAPPS

SEQ ID NO: 651 - protein, 219 aa, Artificial Sequence; identical to SEQ ID NO: 276
  Made in Lab - Fusion construct

SEQ ID NO: 652 - protein, 685 aa, Artificial Sequence
  Made in Lab - Fusion construct
QVTLKESGPALVKPTQTLTLTCTFSGFSLSTPGMGVWWIRQPSGKALEWLADIWWDDNKYTNPSLKSRLTISKDTSKNQVVLTMTNMDPVDTATYYCARRANYGNPYYAQDYWGQGTTVTVSSASTKGPSVFPLAPSSKSTSGGTAALGCLVKDYFPEPVTVSWNSGALTSGVHTFPAVLQSSGLYSLSSVVTVPSSSLGTQTYICNVNHKPSNTKVDKKVEPKSCDKTHTCPPCPAPEAAGGPSVFLFPPKPKDTLMISRTPEVTCVVVDVSHEDPEVKFNWYVDGVEVHNAKTKPREEQYNSTYRVVSVLTVLHQDWLNGKEYKCKVSNKALAAPIEKTISKAKGQPREPQVYTLPPSRDELTKNQVSLTCLVKGFYPSDIAVEWESNGQPENNYKTTPPVLDSDGSFFLYSKLTVDKSRWQQGNVFSCSVMHEALHNHYTQKSLSLSPGPLGLAGSGRSDNRGGGSNWVNVISDLKKIEDLIQSMHIDATLYTESDVHPSCKVTAMKCFLLELQDISLESGDASIHDTVENLIILANNSLSSAGNVTESGCGECEELEEKNIKEFLQSFVHIVQMFINTAGGGSGGGSGGGSGGGSGGGSGGGSIACPPPMSVEHADIWVKSYSLYSRERYICNSGFKRKAGTSSLTECVLNKATNVAHWTTPSLKCIRDPALVHQRPAPPS

SEQ ID NO: 653 - protein, 219 aa, Artificial Sequence; identical to SEQ ID NO: 276
  Made in Lab - Fusion construct

SEQ ID NO: 654 - protein, 677 aa, Artificial Sequence
  Made in Lab - Fusion construct
QVTLKESGPALVKPTQTLTLTCTFSGFSLSTPGMGVWWIRQPPGKALEWLADIWWDDNKYTNPSLKSRLTISKDTSKNQVVLTMTNMDPVDTATYYCARRANYGNPYYAQDYWGQGTTVTVSSASTKGPSVFPLAPSSKSTSGGTAALGCLVKDYFPEPVTVSWNSGALTSGVHTFPAVLQSSGLYSLSSVVTVPSSSLGTQTYICNVNHKPSNTKVDKKVEPKSCDKTHTCPPCPAPEAAGGPSVFLFPPKPKDTLMISRTPEVTCVVVDVSHEDPEVKFNWYVDGVEVHNAKTKPREEQYNSTYRVVSVLTVLHQDWLNGKEYKCKVSNKALAAPIEKTISKAKGQPREPQVYTLPPSRDELTKNQVSLTCLVKGFYPSDIAVEWESNGQPENNYKTTPPVLDSDGSFFLYSKLTVDKSRWQQGNVFSCSVMHEALHNHYTQKSLSLSPGGGSPLGLAGGGSNWVNVISDLKKIEDLIQSMHIDATLYTESDVHPSCKVTAMKCFLLELQDISLESGDASIHDTVENLIILANNSLSSAGNVTESGCKECEELEEKNIKEFLQSFVHIVQMFINTAGGGSPLGLAGSGRSDNRSGGGIACPPPMSVEHADIWVKSYSLYSRERYICNSGFKRKAGTSSLTECVLNKATNVAHWTTPSLKCIRDPALVHQRPAPPS

SEQ ID NO: 655 - protein, 219 aa, Artificial Sequence; identical to SEQ ID NO: 276
  Made in Lab - Fusion construct

SEQ ID NO: 656 - protein, 677 aa, Artificial Sequence; identical to SEQ ID NO: 654
  Made in Lab - Fusion construct

SEQ ID NO: 657 - protein, 219 aa, Artificial Sequence; identical to SEQ ID NO: 314
  Made in Lab - Fusion construct

SEQ ID NO: 658 - protein, 674 aa, Artificial Sequence
  Made in Lab - Fusion construct
EVQLVESGGGLVQPGGSLRLSCAASGFTFSRYWMTWVRQAPGKGLEWIGEINPDSSTANYTPYLKGRFTISRDNAKNSLYLQMNSLRAEDTAVYYCARPVDGYYDAMDPWGQGTTVTVSSASTKGPSVFPLAPSSKSTSGGTAALGCLVKDYFPEPVTVSWNSGALTSGVHTFPAVLQSSGLYSLSSVVTVPSSSLGTQTYICNVNHKPSNTKVDKKVEPKSCDKTHTCPPCPAPEAAGGPSVFLFPPKPKDTLMISRTPEVTCVVVDVSHEDPEVKFNWYVDGVEVHNAKTKPREEQYNSTYRVVSVLTVLHQDWLNGKEYKCKVSNKALAAPIEKTISKAKGQPREPQVYTLPPSRDELTKNQVSLTCLVKGFYPSDIAVEWESNGQPENNYKTTPPVLDSDGSFFLYSKLTVDKSRWQQGNVFSCSVMHEALHNHYTQKSLSLSPGGGSPLGLAGGGSNWVNVISDLKKIEDLIQSMHIDATLYTESDVHPSCKVTAMKCFLLELQDISLESGDASIHDTVENLIILANNSLSSAGNVTESGCKECEELEEKNIKEFLQSFVHIVQMFINTAGGGSPLGLAGSGRSDNRSGGGIACPPPMSVEHADIWVKSYSLYSRERYICNSGFKRKAGTSSLTECVLNKATNVAHWTTPSLKCIRDPALVHQRPAPPS

SEQ ID NO: 659 - protein, 220 aa, Artificial Sequence; identical to SEQ ID NO: 320
  Made in Lab - Fusion construct

SEQ ID NO: 660 - protein, 672 aa, Artificial Sequence
  Made in Lab - Fusion construct
QVTLKESGPALVKPTQTLTLTCTFSGFSLSTPGMGVWWIRQPPGKALEWLADIWWDDNKYTNPSLKSRLTISKDTSKNQVVLTMTNMDPVDTATYYCARRANYGNPYYAQDYWGQGTTVTVSSASTKGPSVFPLAPSSKSTSGGTAALGCLVKDYFPEPVTVSWNSGALTSGVHTFPAVLQSSGLYSLSSVVTVPSSSLGTQTYICNVNHKPSNTKVDKKVEPKSCDKTHTCPPCPAPEAAGGPSVFLFPPKPKDTLMISRTPEVTCVVVDVSHEDPEVKFNWYVDGVEVHNAKTKPREEQYNSTYRVVSVLTVLHQDWLNGKEYKCKVSNKALAAPIEKTISKAKGQPREPQVYTLPPSRDELTKNQVSLTCLVKGFYPSDIAVEWESNGQPENNYKTTPPVLDSDGSFFLYSKLTVDKSRWQQGNVFSCSVMHEALHNHYTQKSLSLSPGKGGGGSDIQMTQSPSSVSASVGDRVTITCRASQGIYSWLAWYQQKPGKAPNLLIYTASTLQSGVPSRFSGSGSGTDFTLTISSLQPEDFATYYCQQANIFPLTFGGGTKVEIKRTVAAPSVFIFPPSDEQLKSGTASVVCLLNNFYPREAKVQWKVDNALQSGNSQESVTEQDSKDSTYSLSSTLTLSKADYEKHKVYACEVTHQGLSSPVTKSFNRGEC

SEQ ID NO: 661 - protein, 224 aa, Artificial Sequence
  Made in Lab - Fusion construct
QVQLVQSGAEVKKPGASVKVSCKASGYTFTGYYMHWVRQAPGQGLEWMGWINPDSGGTNYAQKFQGRVTMTRDTSISTAYMELNRLRSDDTAVYYCARDQPLGYCTNGVCSYFDYWGQGTLVTVSSASTKGPSVFPLAPCSRSTSESTAALGCLVKDYFPEPVTVSWNSGALTSGVHTFPAVLQSSGLYSLSSVVTVPSSSLGTKTYTCNVDHKPSNTKVDKRV

SEQ ID NO: 662 - protein, 219 aa, Artificial Sequence; identical to SEQ ID NO: 276
  Made in Lab - Fusion construct

SEQ ID NO: 663 - protein, 677 aa, Artificial Sequence
  Made in Lab - Fusion construct
QVTLKESGPALVKPTQTLTLTCTFSGFSLSTPGMGVWWIRQPPGKALEWLADIWWDDNKYTNPSLKSRLTISKDTSKNQVVLTMTNMDPVDTATYYCARRANYGNPYYAQDYWGQGTTVTVSSASTKGPSVFPLAPSSKSTSGGTAALGCLVKDYFPEPVTVSWNSGALTSGVHTFPAVLQSSGLYSLSSVVTVPSSSLGTQTYICNVNHKPSNTKVDKKVEPKSCDKTHTCPPCPAPEAAGGPSVFLFPPKPKDTLMISRTPEVTCVVVDVSHEDPEVKFNWYVDGVEVHNAKTKPREEQYNSTYRVVSVLTVLHQDWLNGKEYKCKVSNKALAAPIEKTISKAKGQPREPQVYTLPPSRDELTKNQVSLTCLVKGFYPSDIAVEWESNGQPENNYKTTPPVLDSDGSFFLYSKLTVDKSRWQQGNVFSCSVMHEALHNHYTQKSLSLSPGKGGGGSGGGGSDIQMTQSPSSVSASVGDRVTITCRASQGIYSWLAWYQQKPGKAPNLLIYTASTLQSGVPSRFSGSGSGTDFTLTISSLQPEDFATYYCQQANIFPLTFGGGTKVEIKRTVAAPSVFIFPPSDEQLKSGTASVVCLLNNFYPREAKVQWKVDNALQSGNSQESVTEQDSKDSTYSLSSTLTLSKADYEKHKVYACEVTHQGLSSPVTKSFNRGEC

SEQ ID NO: 664 - protein, 224 aa, Artificial Sequence; identical to SEQ ID NO: 661
  Made in Lab - Fusion construct

SEQ ID NO: 665 - protein, 219 aa, Artificial Sequence; identical to SEQ ID NO: 276
  Made in Lab - Fusion construct

SEQ ID NO: 666 - protein, 682 aa, Artificial Sequence
  Made in Lab - Fusion construct
QVTLKESGPALVKPTQTLTLTCTFSGFSLSTPGMGVWWIRQPPGKALEWLADIWWDDNKYTNPSLKSRLTISKDTSKNQVVLTMTNMDPVDTATYYCARRANYGNPYYAQDYWGQGTTVTVSSASTKGPSVFPLAPSSKSTSGGTAALGCLVKDYFPEPVTVSWNSGALTSGVHTFPAVLQSSGLYSLSSVVTVPSSSLGTQTYICNVNHKPSNTKVDKKVEPKSCDKTHTCPPCPAPEAAGGPSVFLFPPKPKDTLMISRTPEVTCVVVDVSHEDPEVKFNWYVDGVEVHNAKTKPREEQYNSTYRVVSVLTVLHQDWLNGKEYKCKVSNKALAAPIEKTISKAKGQPREPQVYTLPPSRDELTKNQVSLTCLVKGFYPSDIAVEWESNGQPENNYKTTPPVLDSDGSFFLYSKLTVDKSRWQQGNVFSCSVMHEALHNHYTQKSLSLSPGKGGGGSGGGGSGGGGSDIQMTQSPSSVSASVGDRVTITCRASQGIYSWLAWYQQKPGKAPNLLIYTASTLQSGVPSRFSGSGSGTDFTLTISSLQPEDFATYYCQQANIFPLTFGGGTKVEIKRTVAAPSVFIFPPSDEQLKSGTASVVCLLNNFYPREAKVQWKVDNALQSGNSQESVTEQDSKDSTYSLSSTLTLSKADYEKHKVYACEVTHQGLSSPVTKSFNRGEC

SEQ ID NO: 667 - protein, 224 aa, Artificial Sequence; identical to SEQ ID NO: 661
  Made in Lab - Fusion construct

SEQ ID NO: 668 - protein, 219 aa, Artificial Sequence; identical to SEQ ID NO: 276
  Made in Lab - Fusion construct

SEQ ID NO: 669 - protein, 682 aa, Artificial Sequence
  Made in Lab - Fusion construct
QVTLKESGPALVKPTQTLTLTCTFSGFSLSTPGMGVWWIRQPPGKALEWLADIWWDDNKYTNPSLKSRLTISKDTSKNQVVLTMTNMDPVDTATYYCARRANYGNPYYAQDYWGQGTTVTVSSASTKGPSVFPLAPSSKSTSGGTAALGCLVKDYFPEPVTVSWNSGALTSGVHTFPAVLQSSGLYSLSSVVTVPSSSLGTQTYICNVNHKPSNTKVDKKVEPKSCDKTHTCPPCPAPEAAGGPSVFLFPPKPKDTLMISRTPEVTCVVVDVSHEDPEVKFNWYVDGVEVHNAKTKPREEQYNSTYRVVSVLTVLHQDWLNGKEYKCKVSNKALAAPIEKTISKAKGQPREPQVYTLPPSRDELTKNQVSLTCLVKGFYPSDIAVEWESNGQPENNYKTTPPVLDSDGSFFLYSKLTVDKSRWQQGNVFSCSVMHEALHNHYTQKSLSLSPGKGGGGSGGGGSGGGGSSYELTQPPSVSVSPGQTASITCSGDNIGDQYAHWYQQKPGQSPVLVIYQDKNRPSGIPERFSGSNSGNTATLTISGTQAMDEADYYCATYTGFGSLAVFGGGTKLTVLGQPKAAPSVTLFPPSSEELQANKATLVCLISDFYPGAVTVAWKADSSPVKAGVETTTPSKQSNNKYAASSYLSLTPEQWKSHRSYSCQVTHEGSTVEKTVAPTECS

SEQ ID NO: 670 - protein, 214 aa, Artificial Sequence
  Made in Lab - Fusion construct
EVQLVQSGAEVKKPGESLRISCKGSGYSFSTYWISWVRQMPGKGLEWMGKIYPGDSYTNYSPSFQGQVTISADKSISTAYLQWSSLKASDTAMYYCARGYGIFDYWGQGTLVTVSSASTKGPSVFPLAPCSRSTSESTAALGCLVKDYFPEPVTVSWNSGALTSGVHTFPAVLQSSGLYSLSSVVTVPSSSLGTKTYTCNVDHKPSNTKVDKRV

SEQ ID NO: 671 - protein, 219 aa, Artificial Sequence; identical to SEQ ID NO: 276
  Made in Lab - Fusion construct

SEQ ID NO: 672 - protein, 684 aa, Artificial Sequence
  Made in Lab - Fusion construct
QVTLKESGPALVKPTQTLTLTCTFSGFSLSTPGMGVWWIRQPPGKALEWLADIWWDDNKYTNPSLKSRLTISKDTSKNQVVLTMTNMDPVDTATYYCARRANYGNPYYAQDYWGQGTTVTVSSASTKGPSVFPLAPSSKSTSGGTAALGCLVKDYFPEPVTVSWNSGALTSGVHTFPAVLQSSGLYSLSSVVTVPSSSLGTQTYICNVNHKPSNTKVDKKVEPKSCDKTHTCPPCPAPEAAGGPSVFLFPPKPKDTLMISRTPEVTCVVVDVSHEDPEVKFNWYVDGVEVHNAKTKPREEQYNSTYRVVSVLTVLHQDWLNGKEYKCKVSNKALAAPIEKTISKAKGQPREPQVYTLPPSRDELTKNQVSLTCLVKGFYPSDIAVEWESNGQPENNYKTTPPVLDSDGSFFLYSKLTVDKSRWQQGNVFSCSVMHEALHNHYTQKSLSLSPGKGGGGSGGGGSGGGGSEIVLTQSPATLSLSPGERATLSCRASQSVSSYLAWYQQKPGQAPRLLIYDASNRATGIPARFSGSGSGTDFTLTISSLEPEDFAVYYCQQRSNWPPALTFGGGTKVEIKRTVAAPSVFIFPPSDEQLKSGTASVVCLLNNFYPREAKVQWKVDNALQSGNSQESVTEQDSKDSTYSLSSTLTLSKADYEKHKVYACEVTHQGLSSPVTKSFNRGEC

SEQ ID NO: 673 - protein, 219 aa, Artificial Sequence
  Made in Lab - Fusion construct
QVQLQQWGAGLLKPSETLSLTCAVYGGSFSGYYWSWIRQSPEKGLEWIGEINHGGYVTYNPSLESRVTISVDTSKNQFSLKLSSVTAADTAVYYCARDYGPGNYDWYFDLWGRGTLVTVSSASTKGPSVFPLAPCSRSTSESTAALGCLVKDYFPEPVTVSWNSGALTSGVHTFPAVLQSSGLYSLSSVVTVPSSSLGTKTYTCNVDHKPSNTKVDKRV

SEQ ID NO: 674 - protein, 219 aa, Artificial Sequence; identical to SEQ ID NO: 276
  Made in Lab - Fusion construct

SEQ ID NO: 675 - protein, 680 aa, Artificial Sequence
  Made in Lab - Fusion construct
EVQLVQSGAEVKKPGESLRISCKGSGYSFSTYWISWVRQMPGKGLEWMGKIYPGDSYTNYSPSFQGQVTISADKSISTAYLQWSSLKASDTAMYYCARGYGIFDYWGQGTLVTVSSASTKGPSVFPLAPSSKSTSGGTAALGCLVKDYFPEPVTVSWNSGALTSGVHTFPAVLQSSGLYSLSSVVTVPSSSLGTQTYICNVNHKPSNTKVDKKVEPKSCDKTHTCPPCPAPEAAGGPSVFLFPPKPKDTLMISRTPEVTCVVVDVSHEDPEVKFNWYVDGVEVHNAKTKPREEQYNSTYRVVSVLTVLHQDWLNGKEYKCKVSNKALAAPIEKTISKAKGQPREPQVYTLPPSRDELTKNQVSLTCLVKGFYPSDIAVEWESNGQPENNYKTTPPVLDSDGSFFLYSKLTVDKSRWQQGNVFSCSVMHEALHNHYTQKSLSLSPGKGGGGSGGGGSGGGGSDIVMTQTPLSLPVTPGEPASISCRSSQSIVSSWGNTYLEWYLQKPGQSPQLLIYKVSNRFSGVPDRFSGSGSGTDFTLKISRVEAEDVGVYYCFQGSHVPWTFGQGTKVEIKRTVAAPSVFIFPPSDEQLKSGTASVVCLLNNFYPREAKVQWKVDNALQSGNSQESVTEQDSKDSTYSLSSTLTLSKADYEKHKVYACEVTHQGLSSPVTKSFNRGEC

SEQ ID NO: 676 - protein, 228 aa, Artificial Sequence
  Made in Lab - Fusion construct
QVTLKESGPALVKPTQTLTLTCTFSGFSLSTPGMGVWWIRQPPGKALEWLADIWWDDNKYTNPSLKSRLTISKDTSKNQVVLTMTNMDPVDTATYYCARRANYGNPYYAQDYWGQGTTVTVSSASTKGPSVFPLAPSSKSTSGGTAALGCLVKDYFPEPVTVSWNSGALTSGVHTFPAVLQSSGLYSLSSVVTVPSSSLGTQTYICNVNHKPSNTKVDKKVEPKSCDK

SEQ ID NO: 677 - protein, 214 aa, Artificial Sequence
  Made in Lab - Fusion construct
SYELTQPPSVSVSPGQTASITCSGDNIGDQYAHWYQQKPGQSPVLVIYQDKNRPSGIPERFSGSNSGNTATLTISGTQAMDEADYYCATYTGFGSLAVFGGGTKLTVLGQPKAAPSVTLFPPSSEELQANKATLVCLISDFYPGAVTVAWKADSSPVKAGVETTTPSKQSNNKYAASSYLSLTPEQWKSHRSYSCQVTHEGSTVEKTVAPTECS

SEQ ID NO: 678 - protein, 685 aa, Artificial Sequence
  Made in Lab - Fusion construct
QVQLQQWGAGLLKPSETLSLTCAVYGGSFSGYYWSWIRQSPEKGLEWIGEINHGGYVTYNPSLESRVTISVDTSKNQFSLKLSSVTAADTAVYYCARDYGPGNYDWYFDLWGRGTLVTVSSASTKGPSVFPLAPSSKSTSGGTAALGCLVKDYFPEPVTVSWNSGALTSGVHTFPAVLQSSGLYSLSSVVTVPSSSLGTQTYICNVNHKPSNTKVDKKVEPKSCDKTHTCPPCPAPEAAGGPSVFLFPPKPKDTLMISRTPEVTCVVVDVSHEDPEVKFNWYVDGVEVHNAKTKPREEQYNSTYRVVSVLTVLHQDWLNGKEYKCKVSNKALAAPIEKTISKAKGQPREPQVYTLPPSRDELTKNQVSLTCLVKGFYPSDIAVEWESNGQPENNYKTTPPVLDSDGSFFLYSKLTVDKSRWQQGNVFSCSVMHEALHNHYTQKSLSLSPGKGGGGSGGGGSGGGGSDIVMTQTPLSLPVTPGEPASISCRSSQSIVSSWGNTYLEWYLQKPGQSPQLLIYKVSNRFSGVPDRFSGSGSGTDFTLKISRVEAEDVGVYYCFQGSHVPWTFGQGTKVEIKRTVAAPSVFIFPPSDEQLKSGTASVVCLLNNFYPREAKVQWKVDNALQSGNSQESVTEQDSKDSTYSLSSTLTLSKADYEKHKVYACEVTHQGLSSPVTKSFNRGEC

SEQ ID NO: 679 - protein, 228 aa, Artificial Sequence; identical to SEQ ID NO: 676
  Made in Lab - Fusion construct

SEQ ID NO: 680 - protein, 216 aa, Artificial Sequence
  Made in Lab - Fusion construct
EIVLTQSPATLSLSPGERATLSCRASQSVSSYLAWYQQKPGQAPRLLIYDASNRATGIPARFSGSGSGTDFTLTISSLEPEDFAVYYCQQRSNWPPALTFGGGTKVEIKRTVAAPSVFIFPPSDEQLKSGTASVVCLLNNFYPREAKVQWKVDNALQSGNSQESVTEQDSKDSTYSLSSTLTLSKADYEKHKVYACEVTHQGLSSPVTKSFNRGEC

SEQ ID NO: 681 - protein, 988 aa, Artificial Sequence
  Made in Lab - Fusion construct
QVTLKESGPALVKPTQTLTLTCTFSGFSLSTPGMGVWWIRQPPGKALEWLADIWWDDNKYTNPSLKSRLTISKDTSKNQVVLTMTNMDPVDTATYYCARRANYGNPYYAQDYWGQGTTVTVSSASTKGPSVFPLAPSSKSTSGGTAALGCLVKDYFPEPVTVSWNSGALTSGVHTFPAVLQSSGLYSLSSVVTVPSSSLGTQTYICNVNHKPSNTKVDKKVEPKSCDKTHTCPPCPAPEAAGGPSVFLFPPKPKDTLMISRTPEVTCVVVDVSHEDPEVKFNWYVDGVEVHNAKTKPREEQYNSTYRVVSVLTVLHQDWLNGKEYKCKVSNKALAAPIEKTISKAKGQPREPQVYTLPPSRDELTKNQVSLTCLVKGFYPSDIAVEWESNGQPENNYKTTPPVLDSDGSFFLYSKLTVDKSRWQQGNVFSCSVMHEALHNHYTQKSLSLSPGGGGGSGGGGSGGGGSMWELEKDVYVVEVDWTPDAPGETVNLTCDTPEEDDITWTSDQRHGVIGSGKTLTITVKEFLDAGQYTCHKGGETLSHSHLLLHKKENGIWSTEILKNFKNKTFLKCEAPNYSGRFTCSWLVQRNMDLKFNIKSSSSSPDSRAVTCGMASLSAEKVTLDQRDYEKYSVSCQEDVTCPTAEETLPIELALEARQQNKYENYSTSFFIRDIIKPDPPKNLQMKPLKNSQVEVSWEYPDSWSTPHSYFSLKFFVRIQRKKEKMKETEEGCNQKGAFLVEKTSTEVQCKGGNVCVQAQDRYYNSSCSKWACVPCRVRSGGGGSGGGGSGGGGSRVIPVSGPARCLSQSRNLLKTTDDMVKTAREKLKHYSCTAEDIDHEDITRDQTSTLKTCLPLELHKNESCLATRETSSTTRGSCLPPQKTSLMMTLCLGSIYEDLKMYQTEFQAINAALQNHNHQQIILDKGMLVAIDELMQSLNHNGETLRQKPPVGEADPYRVKMKLCILLHAFSTRVVTINRVMGYLSSA

SEQ ID NO: 682 - protein, 219 aa, Artificial Sequence; identical to SEQ ID NO: 314
  Made in Lab - Fusion construct

SEQ ID NO: 683 - protein, 985 aa, Artificial Sequence
  Made in Lab - Fusion construct
EVQLVESGGGLVQPGGSLRLSCAASGFTFSRYWMTWVRQAPGKGLEWIGEINPDSSTANYTPYLKGRFTISRDNAKNSLYLQMNSLRAEDTAVYYCARPVDGYYDAMDPWGQGTTVTVSSASTKGPSVFPLAPSSKSTSGGTAALGCLVKDYFPEPVTVSWNSGALTSGVHTFPAVLQSSGLYSLSSVVTVPSSSLGTQTYICNVNHKPSNTKVDKKVEPKSCDKTHTCPPCPAPEAAGGPSVFLFPPKPKDTLMISRTPEVTCVVVDVSHEDPEVKFNWYVDGVEVHNAKTKPREEQYNSTYRVVSVLTVLHQDWLNGKEYKCKVSNKALAAPIEKTISKAKGQPREPQVYTLPPSRDELTKNQVSLTCLVKGFYPSDIAVEWESNGQPENNYKTTPPVLDSDGSFFLYSKLTVDKSRWQQGNVFSCSVMHEALHNHYTQKSLSLSPGGGGGSGGGGSGGGGSMWELEKDVYVVEVDWTPDAPGETVNLTCDTPEEDDITWTSDQRHGVIGSGKTLTITVKEFLDAGQYTCHKGGETLSHSHLLLHKKENGIWSTEILKNFKNKTFLKCEAPNYSGRFTCSWLVQRNMDLKFNIKSSSSSPDSRAVTCGMASLSAEKVTLDQRDYEKYSVSCQEDVTCPTAEETLPIELALEARQQNKYENYSTSFFIRDIIKPDPPKNLQMKPLKNSQVEVSWEYPDSWSTPHSYFSLKFFVRIQRKKEKMKETEEGCNQKGAFLVEKTSTEVQCKGGNVCVQAQDRYYNSSCSKWACVPCRVRSGGGGSGGGGSGGGGSRVIPVSGPARCLSQSRNLLKTTDDMVKTAREKLKHYSCTAEDIDHEDITRDQTSTLKTCLPLELHKNESCLATRETSSTTRGSCLPPQKTSLMMTLCLGSIYEDLKMYQTEFQAINAALQNHNHQQIILDKGMLVAIDELMQSLNHNGETLRQKPPVGEADPYRVKMKLCILLHAFSTRVVTINRVMGYLSSA

SEQ ID NO: 684 - protein, 220 aa, Artificial Sequence; identical to SEQ ID NO: 320
  Made in Lab - Fusion construct

SEQ ID NO: 685 - protein, 600 aa, Artificial Sequence
  Made in Lab - Fusion construct
QVTLKESGPALVKPTQTLTLTCTFSGFSLSTPGMGVWWIRQPPGKALEWLADIWWDDNKYTNPSLKSRLTISKDTSKNQVVLTMTNMDPVDTATYYCARRANYGNPYYAQDYWGQGTTVTVSSASTKGPSVFPLAPSSKSTSGGTAALGCLVKDYFPEPVTVSWNSGALTSGVHTFPAVLQSSGLYSLSSVVTVPSSSLGTQTYICNVNHKPSNTKVDKKVEPKSCDKTHTCPPCPAPEAAGGPSVFLFPPKPKDTLMISRTPEVTCVVVDVSHEDPEVKFNWYVDGVEVHNAKTKPREEQYNSTYRVVSVLTVLHQDWLNGKEYKCKVSNKALAAPIEKTISKAKGQPREPQVYTLPPSRDELTKNQVSLTCLVKGFYPSDIAVEWESNGQPENNYKTTPPVLDSDGSFFLYSKLTVDKSRWQQGNVFSCSVMHEALHNHYTQKSLSLSPGGGGGSGGGGSGGGGSAPASSSTKKTQLQLEHLLLDLQMILNGINNYKNPELTRMLTFKFYMPKKATELKHLQCLEEELKPLEEVLNLAQSKNFHLRPRDLISNINVIVLELKGSETTFMCEYADETATIVEFLNRWITFSQSIISTLT

SEQ ID NO: 686 - protein, 219 aa, Artificial Sequence; identical to SEQ ID NO: 314
  Made in Lab - Fusion construct

SEQ ID NO: 687 - protein, 597 aa, Artificial Sequence
  Made in Lab - Fusion construct
EVQLVESGGGLVQPGGSLRLSCAASGFTFSRYWMTWVRQAPGKGLEWIGEINPDSSTANYTPYLKGRFTISRDNAKNSLYLQMNSLRAEDTAVYYCARPVDGYYDAMDPWGQGTTVTVSSASTKGPSVFPLAPSSKSTSGGTAALGCLVKDYFPEPVTVSWNSGALTSGVHTFPAVLQSSGLYSLSSVVTVPSSSLGTQTYICNVNHKPSNTKVDKKVEPKSCDKTHTCPPCPAPEAAGGPSVFLFPPKPKDTLMISRTPEVTCVVVDVSHEDPEVKFNWYVDGVEVHNAKTKPREEQYNSTYRVVSVLTVLHQDWLNGKEYKCKVSNKALAAPIEKTISKAKGQPREPQVYTLPPSRDELTKNQVSLTCLVKGFYPSDIAVEWESNGQPENNYKTTPPVLDSDGSFFLYSKLTVDKSRWQQGNVFSCSVMHEALHNHYTQKSLSLSPGGGGGSGGGGSGGGGSAPASSSTKKTQLQLEHLLLDLQMILNGINNYKNPELTRMLTFKFYMPKKATELKHLQCLEEELKPLEEVLNLAQSKNFHLRPRDLISNINVIVLELKGSETTFMCEYADETATIVEFLNRWITFSQSIISTLT

SEQ ID NO: 688 - protein, 220 aa, Artificial Sequence; identical to SEQ ID NO: 320
  Made in Lab - Fusion construct

SEQ ID NO: 689 - protein, 619 aa, Artificial Sequence
  Made in Lab - Fusion construct
QVTLKESGPALVKPTQTLTLTCTFSGFSLSTPGMGVWWIRQPPGKALEWLADIWWDDNKYTNPSLKSRLTISKDTSKNQVVLTMTNMDPVDTATYYCARRANYGNPYYAQDYWGQGTTVTVSSASTKGPSVFPLAPSSKSTSGGTAALGCLVKDYFPEPVTVSWNSGALTSGVHTFPAVLQSSGLYSLSSVVTVPSSSLGTQTYICNVNHKPSNTKVDKKVEPKSCDKTHTCPPCPAPEAAGGPSVFLFPPKPKDTLMISRTPEVTCVVVDVSHEDPEVKFNWYVDGVEVHNAKTKPREEQYNSTYRVVSVLTVLHQDWLNGKEYKCKVSNKALAAPIEKTISKAKGQPREPQVYTLPPSRDELTKNQVSLTCLVKGFYPSDIAVEWESNGQPENNYKTTPPVLDSDGSFFLYSKLTVDKSRWQQGNVFSCSVMHEALHNHYTQKSLSLSPGGGGGSGGGGSGGGGSDCDIEGKDGKQYESVLMVSIDQLLDSMKEIGSNCLNNEFNFFKRHICDANKEGMFLFRAARKLRQFLKMNSTGDFDLHLLKVSEGTTILLNCTGQVKGRKPAALGAAQPTKSLEENKSLKEQKKLNDLCFLKRLLQEIKTCWNKILMGTKEH

SEQ ID NO: 690 - protein, 219 aa, Artificial Sequence; identical to SEQ ID NO: 314
  Made in Lab - Fusion construct

SEQ ID NO: 691 - protein, 616 aa, Artificial Sequence
  Made in Lab - Fusion construct
EVQLVESGGGLVQPGGSLRLSCAASGFTFSRYWMTWVRQAPGKGLEWIGEINPDSSTANYTPYLKGRFTISRDNAKNSLYLQMNSLRAEDTAVYYCARPVDGYYDAMDPWGQGTTVTVSSASTKGPSVFPLAPSSKSTSGGTAALGCLVKDYFPEPVTVSWNSGALTSGVHTFPAVLQSSGLYSLSSVVTVPSSSLGTQTYICNVNHKPSNTKVDKKVEPKSCDKTHTCPPCPAPEAAGGPSVFLFPPKPKDTLMISRTPEVTCVVVDVSHEDPEVKFNWYVDGVEVHNAKTKPREEQYNSTYRVVSVLTVLHQDWLNGKEYKCKVSNKALAAPIEKTISKAKGQPREPQVYTLPPSRDELTKNQVSLTCLVKGFYPSDIAVEWESNGQPENNYKTTPPVLDSDGSFFLYSKLTVDKSRWQQGNVFSCSVMHEALHNHYTQKSLSLSPGGGGGSGGGGSGGGGSDCDIEGKDGKQYESVLMVSIDQLLDSMKEIGSNCLNNEFNFFKRHICDANKEGMFLFRAARKLRQFLKMNSTGDFDLHLLKVSEGTTILLNCTGQVKGRKPAALGAAQPTKSLEENKSLKEQKKLNDLCFLKRLLQEIKTCWNKILMGTKEH

SEQ ID NO: 692 - protein, 220 aa, Artificial Sequence; identical to SEQ ID NO: 320
  Made in Lab - Fusion construct

SEQ ID NO: 693 - protein, 581 aa, Artificial Sequence
  Made in Lab - Fusion construct
QVTLKESGPALVKPTQTLTLTCTFSGFSLSTPGMGVWWIRQPPGKALEWLADIWWDDNKYTNPSLKSRLTISKDTSKNQVVLTMTNMDPVDTATYYCARRANYGNPYYAQDYWGQGTTVTVSSASTKGPSVFPLAPSSKSTSGGTAALGCLVKDYFPEPVTVSWNSGALTSGVHTFPAVLQSSGLYSLSSVVTVPSSSLGTQTYICNVNHKPSNTKVDKKVEPKSCDKTHTCPPCPAPEAAGGPSVFLFPPKPKDTLMISRTPEVTCVVVDVSHEDPEVKFNWYVDGVEVHNAKTKPREEQYNSTYRVVSVLTVLHQDWLNGKEYKCKVSNKALAAPIEKTISKAKGQPREPQVYTLPPSRDELTKNQVSLTCLVKGFYPSDIAVEWESNGQPENNYKTTPPVLDSDGSFFLYSKLTVDKSRWQQGNVFSCSVMHEALHNHYTQKSLSLSPGGGGGSGGGGSGGGGSNWVNVISDLKKIEDLIQSMHIDATLYTESDVHPSCKVTAMKCFLLELQVISLESGDASIHDTVENLIILANNSLSSNGNVTESGCKECEELEEKNIKEFLQSFVHIVQMFINTS

SEQ ID NO: 694 - protein, 219 aa, Artificial Sequence; identical to SEQ ID NO: 314
  Made in Lab - Fusion construct

SEQ ID NO: 695 - protein, 578 aa, Artificial Sequence
  Made in Lab - Fusion construct
EVQLVESGGGLVQPGGSLRLSCAASGFTFSRYWMTWVRQAPGKGLEWIGEINPDSSTANYTPYLKGRFTISRDNAKNSLYLQMNSLRAEDTAVYYCARPVDGYYDAMDPWGQGTTVTVSSASTKGPSVFPLAPSSKSTSGGTAALGCLVKDYFPEPVTVSWNSGALTSGVHTFPAVLQSSGLYSLSSVVTVPSSSLGTQTYICNVNHKPSNTKVDKKVEPKSCDKTHTCPPCPAPEAAGGPSVFLFPPKPKDTLMISRTPEVTCVVVDVSHEDPEVKFNWYVDGVEVHNAKTKPREEQYNSTYRVVSVLTVLHQDWLNGKEYKCKVSNKALAAPIEKTISKAKGQPREPQVYTLPPSRDELTKNQVSLTCLVKGFYPSDIAVEWESNGQPENNYKTTPPVLDSDGSFFLYSKLTVDKSRWQQGNVFSCSVMHEALHNHYTQKSLSLSPGGGGGSGGGGSGGGGSNWVNVISDLKKIEDLIQSMHIDATLYTESDVHPSCKVTAMKCFLLELQVISLESGDASIHDTVENLIILANNSLSSNGNVTESGCKECEELEEKNIKEFLQSFVHIVQMFINTS

SEQ ID NO: 696 - protein, 220 aa, Artificial Sequence; identical to SEQ ID NO: 320
  Made in Lab - Fusion construct

SEQ ID NO: 697 - protein, 600 aa, Artificial Sequence
  Made in Lab - Fusion construct
QVTLKESGPALVKPTQTLTLTCTFSGFSLSTPGMGVWWIRQPPGKALEWLADIWWDDNKYTNPSLKSRLTISKDTSKNQVVLTMTNMDPVDTATYYCARRANYGNPYYAQDYWGQGTTVTVSSASTKGPSVFPLAPSSKSTSGGTAALGCLVKDYFPEPVTVSWNSGALTSGVHTFPAVLQSSGLYSLSSVVTVPSSSLGTQTYICNVNHKPSNTKVDKKVEPKSCDKTHTCPPCPAPEAAGGPSVFLFPPKPKDTLMISRTPEVTCVVVDVSHEDPEVKFNWYVDGVEVHNAKTKPREEQYNSTYRVVSVLTVLHQDWLNGKEYKCKVSNKALAAPIEKTISKAKGQPREPQVYTLPPSRDELTKNQVSLTCLVKGFYPSDIAVEWESNGQPENNYKTTPPVLDSDGSFFLYSKLTVDKSRWQQGNVFSCSVMHEALHNHYTQKSLSLSPGGGGGSGGGGSGGGGSQGQDRHMIRMRQLIDIVDQLKNYVNDLVPEFLPAPEDVETNCEWSAFSCFQKAQLKSANTGNNERIINVSIKKLKRKPPSTNAGRRQKHRLTCPSCDSYEKKPPKEFLERFKSLLQKMIHQHLSSRTHGSEDS

SEQ ID NO: 698 - protein, 219 aa, Artificial Sequence; identical to SEQ ID NO: 314
  Made in Lab - Fusion construct

SEQ ID NO: 699 - protein, 597 aa, Artificial Sequence
  Made in Lab - Fusion construct
EVQLVESGGGLVQPGGSLRLSCAASGFTFSRYWMTWVRQAPGKGLEWIGEINPDSSTANYTPYLKGRFTISRDNAKNSLYLQMNSLRAEDTAVYYCARPVDGYYDAMDPWGQGTTVTVSSASTKGPSVFPLAPSSKSTSGGTAALGCLVKDYFPEPVTVSWNSGALTSGVHTFPAVLQSSGLYSLSSVVTVPSSSLGTQTYICNVNHKPSNTKVDKKVEPKSCDKTHTCPPCPAPEAAGGPSVFLFPPKPKDTLMISRTPEVTCVVVDVSHEDPEVKFNWYVDGVEVHNAKTKPREEQYNSTYRVVSVLTVLHQDWLNGKEYKCKVSNKALAAPIEKTISKAKGQPREPQVYTLPPSRDELTKNQVSLTCLVKGFYPSDIAVEWESNGQPENNYKTTPPVLDSDGSFFLYSKLTVDKSRWQQGNVFSCSVMHEALHNHYTQKSLSLSPGGGGGSGGGGSGGGGSQGQDRHMIRMRQLIDIVDQLKNYVNDLVPEFLPAPEDVETNCEWSAFSCFQKAQLKSANTGNNERIINVSIKKLKRKPPSTNAGRRQKHRLTCPSCDSYEKKPPKEFLERFKSLLQKMIHQHLSSRTHGSEDS

SEQ ID NO: 700 - protein, 220 aa, Artificial Sequence; identical to SEQ ID NO: 320
  Made in Lab - Fusion construct

SEQ ID NO: 701 - protein, 632 aa, Artificial Sequence
  Made in Lab - Fusion construct
QVTLKESGPALVKPTQTLTLTCTFSGFSLSTPGMGVWWIRQPPGKALEWLADIWWDDNKYTNPSLKSRLTISKDTSKNQVVLTMTNMDPVDTATYYCARRANYGNPYYAQDYWGQGTTVTVSSASTKGPSVFPLAPSSKSTSGGTAALGCLVKDYFPEPVTVSWNSGALTSGVHTFPAVLQSSGLYSLSSVVTVPSSSLGTQTYICNVNHKPSNTKVDKKVEPKSCDKTHTCPPCPAPEAAGGPSVFLFPPKPKDTLMISRTPEVTCVVVDVSHEDPEVKFNWYVDGVEVHNAKTKPREEQYNSTYRVVSVLTVLHQDWLNGKEYKCKVSNKALAAPIEKTISKAKGQPREPQVYTLPPSRDELTKNQVSLTCLVKGFYPSDIAVEWESNGQPENNYKTTPPVLDSDGSFFLYSKLTVDKSRWQQGNVFSCSVMHEALHNHYTQKSLSLSPGGGGGSGGGGSGGGGSCDLPQTHSLGSRRTLMLLAQMRRISLFSCLKDRHDFGFPQEEFGNQFQKAETIPVLHEMIQQIFNLFSTKDSSAAWDETLLDKFYTELYQQLNDLEACVIQGVGVTETPLMKEDSILAVRKYFQRITLYLKEKKYSPCAWEVVRAEIMRSFSLSTNLQESLRSKE

SEQ ID NO: 702 - protein, 219 aa, Artificial Sequence; identical to SEQ ID NO: 314
  Made in Lab - Fusion construct

SEQ ID NO: 703 - protein, 629 aa, Artificial Sequence
  Made in Lab - Fusion construct
EVQLVESGGGLVQPGGSLRLSCAASGFTFSRYWMTWVRQAPGKGLEWIGEINPDSSTANYTPYLKGRFTISRDNAKNSLYLQMNSLRAEDTAVYYCARPVDGYYDAMDPWGQGTTVTVSSASTKGPSVFPLAPSSKSTSGGTAALGCLVKDYFPEPVTVSWNSGALTSGVHTFPAVLQSSGLYSLSSVVTVPSSSLGTQTYICNVNHKPSNTKVDKKVEPKSCDKTHTCPPCPAPEAAGGPSVFLFPPKPKDTLMISRTPEVTCVVVDVSHEDPEVKFNWYVDGVEVHNAKTKPREEQYNSTYRVVSVLTVLHQDWLNGKEYKCKVSNKALAAPIEKTISKAKGQPREPQVYTLPPSRDELTKNQVSLTCLVKGFYPSDIAVEWESNGQPENNYKTTPPVLDSDGSFFLYSKLTVDKSRWQQGNVFSCSVMHEALHNHYTQKSLSLSPGGGGGSGGGGSGGGGSCDLPQTHSLGSRRTLMLLAQMRRISLFSCLKDRHDFGFPQEEFGNQFQKAETIPVLHEMIQQIFNLFSTKDSSAAWDETLLDKFYTELYQQLNDLEACVIQGVGVTETPLMKEDSILAVRKYFQRITLYLKEKKYSPCAWEVVRAEIMRSFSLSTNLQESLRSKE

SEQ ID NO: 704 - protein, 220 aa, Artificial Sequence; identical to SEQ ID NO: 320
  Made in Lab - Fusion construct

1. A fusion protein, comprising
(a) an antibody, or antigen-binding fragment thereof, which specifically binds to a denatured human collagen type I, II, III, IV, and/or V polypeptide at a cryptic collagen epitope, wherein (a) is fused via a linker to;
(b) an effector domain.

2. The fusion protein of claim 1, wherein (a) preferentially binds to the denatured human collagen type I, II, III, IV, and/or V polypeptide relative to a corresponding native human collagen polypeptide, optionally wherein (a) has about or at least about 2, 3, 4, 5, 6, 7, 8, 9, 10, 15, 20, 25, 30, 35, 40, 50, 60, 70, 80, 90, or 100-fold higher binding affinity for the denatured human collagen polypeptide than it has for the corresponding native human collagen polypeptide.

3. The fusion protein of claim 1 or 2, wherein (a) specifically binds to the denatured human collagen type I, II, III, IV, and V polypeptides at the HU177 cryptic collagen epitope, optionally wherein the HU177 cryptic collagen epitope comprises PGXP (SEQ ID NO: 422), LPGXPG (SEQ ID NO: 423), and/or GPP′GXP′G (SEQ ID NO: 424), wherein X is any amino acid, and wherein P′ is hydroxylproline.

4. The fusion protein of claim 1 or 2, wherein (a) specifically binds to the denatured human collagen type IV polypeptide at the HUIV26 cryptic collagen epitope.

5. The fusion protein of any one of claims 1-4, wherein (a) comprises:
a heavy chain variable (V_{H}) region that comprises complementary determining region V_{H}CDR1, V_{H}CDR2, and V_{H}CDR3 sequences selected from Table A1 and variants thereof which specifically bind to the denatured human collagen polypeptide at the cryptic collagen epitope; and
a light chain variable (V_{L}) region that comprises complementary determining region V_{L}CDR1, V_{L}CDR2, and V_{L}CDR3 sequences selected from Table A1 and variants thereof which specifically bind to the denatured human collagen polypeptide at the cryptic collagen epitope.

6. The fusion protein of claim 5, wherein (a) comprises:
the V_{H}CDR1, a V_{H}CDR2, and V_{H}CDR3 regions respectively comprise SEQ ID NOs: 1-3; and the V_{L}CDR1, V_{L}CDR2, and V_{L}CDR3 regions respectively comprise SEQ ID NOs: 4-6;
the V_{H}CDR1, a V_{H}CDR2, and V_{H}CDR3 regions respectively comprise SEQ ID NOs: 7-9; and the V_{L}CDR1, V_{L}CDR2, and V_{L}CDR3 regions respectively comprise SEQ ID NOs: 10-12;
the V_{H}CDR1, a V_{H}CDR2, and V_{H}CDR3 regions respectively comprise SEQ ID NOs: 13-15; and the V_{L}CDR1, V_{L}CDR2, and V_{L}CDR3 regions respectively comprise SEQ ID NOs: 16-18;
the V_{H}CDR1, a V_{H}CDR2, and V_{H}CDR3 regions respectively comprise SEQ ID NOs: 19-21; and the V_{L}CDR1, V_{L}CDR2, and V_{L}CDR3 regions respectively comprise SEQ ID NOs: 22-24;
the V_{H}CDR1, a V_{H}CDR2, and V_{H}CDR3 regions respectively comprise SEQ ID NOs: 25-27; and the V_{L}CDR1, V_{L}CDR2, and V_{L}CDR3 regions respectively comprise SEQ ID NOs: 28-30;
the V_{H}CDR1, a V_{H}CDR2, and V_{H}CDR3 regions respectively comprise SEQ ID NOs: 31-33; and the V_{L}CDR1, V_{L}CDR2, and V_{L}CDR3 regions respectively comprise SEQ ID NOs: 34-36;
the V_{H}CDR1, a V_{H}CDR2, and V_{H}CDR3 regions respectively comprise SEQ ID NOs: 37-39; and the V_{L}CDR1, V_{L}CDR2, and V_{L}CDR3 regions respectively comprise SEQ ID NOs: 40-42;
the V_{H}CDR1, a V_{H}CDR2, and V_{H}CDR3 regions respectively comprise SEQ ID NOs: 43-45; and the V_{L}CDR1, V_{L}CDR2, and V_{L}CDR3 regions respectively comprise SEQ ID NOs: 46-48;
the V_{H}CDR1, a V_{H}CDR2, and V_{H}CDR3 regions respectively comprise SEQ ID NOs: 49-51; and the V_{L}CDR1, V_{L}CDR2, and V_{L}CDR3 regions respectively comprise SEQ ID NOs: 52-54;
the V_{H}CDR1, a V_{H}CDR2, and V_{H}CDR3 regions respectively comprise SEQ ID NOs: 55-57; and the V_{L}CDR1, V_{L}CDR2, and V_{L}CDR3 regions respectively comprise SEQ ID NOs: 58-60;
the V_{H}CDR1, a V_{H}CDR2, and V_{H}CDR3 regions respectively comprise SEQ ID NOs: 61-63; and the V_{L}CDR1, V_{L}CDR2, and V_{L}CDR3 regions respectively comprise SEQ ID NOs: 64-66;
the V_{H}CDR1, a V_{H}CDR2, and V_{H}CDR3 regions respectively comprise SEQ ID NOs: 67-69; and the V_{L}CDR1, V_{L}CDR2, and V_{L}CDR3 regions respectively comprise SEQ ID NOs: 70-72;
the V_{H}CDR1, a V_{H}CDR2, and V_{H}CDR3 regions respectively comprise SEQ ID NOs: 73-75; and the V_{L}CDR1, V_{L}CDR2, and V_{L}CDR3 regions respectively comprise SEQ ID NOs: 76-78;
the V_{H}CDR1, a V_{H}CDR2, and V_{H}CDR3 regions respectively comprise SEQ ID NOs: 79-81; and the V_{L}CDR1, V_{L}CDR2, and V_{L}CDR3 regions respectively comprise SEQ ID NOs: 82-84;
the V_{H}CDR1, a V_{H}CDR2, and V_{H}CDR3 regions respectively comprise SEQ ID NOs: 85-87; and the V_{L}CDR1, V_{L}CDR2, and V_{L}CDR3 regions respectively comprise SEQ ID NOs: 88-90;
the V_{H}CDR1, a V_{H}CDR2, and V_{H}CDR3 regions respectively comprise SEQ ID NOs: 91-93; and the V_{L}CDR1, V_{L}CDR2, and V_{L}CDR3 regions respectively comprise SEQ ID NOs: 94-96;
the V_{H}CDR1, a V_{H}CDR2, and V_{H}CDR3 regions respectively comprise SEQ ID NOs: 97-99; and the V_{L}CDR1, V_{L}CDR2, and V_{L}CDR3 regions respectively comprise SEQ ID NOs: 100-102;
the V_{H}CDR1, a V_{H}CDR2, and V_{H}CDR3 regions respectively comprise SEQ ID NOs: 103-105; and the V_{L}CDR1, V_{L}CDR2, and V_{L}CDR3 regions respectively comprise SEQ ID NOs: 106-108;
the V_{H}CDR1, a V_{H}CDR2, and V_{H}CDR3 regions respectively comprise SEQ ID NOs: 109-111; and the V_{L}CDR1, V_{L}CDR2, and V_{L}CDR3 regions respectively comprise SEQ ID NOs: 112-114;
the V_{H}CDR1, a V_{H}CDR2, and V_{H}CDR3 regions respectively comprise SEQ ID NOs: 115-117; and the V_{L}CDR1, V_{L}CDR2, and V_{L}CDR3 regions respectively comprise SEQ ID NOs: 118-120;
the V_{H}CDR1, a V_{H}CDR2, and V_{H}CDR3 regions respectively comprise SEQ ID NOs: 121-123; and the V_{L}CDR1, V_{L}CDR2, and V_{L}CDR3 regions respectively comprise SEQ ID NOs: 124-126;
the V_{H}CDR1, a V_{H}CDR2, and V_{H}CDR3 regions respectively comprise SEQ ID NOs: 127-129; and the V_{L}CDR1, V_{L}CDR2, and V_{L}CDR3 regions respectively comprise SEQ ID NOs: 130-132;
the V_{H}CDR1, a V_{H}CDR2, and V_{H}CDR3 regions respectively comprise SEQ ID NOs: 133-135; and the V_{L}CDR1, V_{L}CDR2, and V_{L}CDR3 regions respectively comprise SEQ ID NOs: 136-138;
the V_{H}CDR1, a V_{H}CDR2, and V_{H}CDR3 regions respectively comprise SEQ ID NOs: 139-141; and the V_{L}CDR1, V_{L}CDR2, and V_{L}CDR3 regions respectively comprise SEQ ID NOs: 142-144;
the V_{H}CDR1, a V_{H}CDR2, and V_{H}CDR3 regions respectively comprise SEQ ID NOs: 145-147; and the V_{L}CDR1, V_{L}CDR2, and V_{L}CDR3 regions respectively comprise SEQ ID NOs: 148-150;
the V_{H}CDR1, a V_{H}CDR2, and V_{H}CDR3 regions respectively comprise SEQ ID NOs: 151-153; and the V_{L}CDR1, V_{L}CDR2, and V_{L}CDR3 regions respectively comprise SEQ ID NOs: 154-156;
the V_{H}CDR1, a V_{H}CDR2, and V_{H}CDR3 regions respectively comprise SEQ ID NOs: 157-159; and the V_{L}CDR1, V_{L}CDR2, and V_{L}CDR3 regions respectively comprise SEQ ID NOs: 160-162;
the V_{H}CDR1, a V_{H}CDR2, and V_{H}CDR3 regions respectively comprise SEQ ID NOs: 163-165; and the V_{L}CDR1, V_{L}CDR2, and V_{L}CDR3 regions respectively comprise SEQ ID NOs: 166-168;
the V_{H}CDR1, a V_{H}CDR2, and V_{H}CDR3 regions respectively comprise SEQ ID NOs: 169-171; and the V_{L}CDR1, V_{L}CDR2, and V_{L}CDR3 regions respectively comprise SEQ ID NOs: 172-174;
the V_{H}CDR1, a V_{H}CDR2, and V_{H}CDR3 regions respectively comprise SEQ ID NOs: 175-177; and the V_{L}CDR1, V_{L}CDR2, and V_{L}CDR3 regions respectively comprise SEQ ID NOs: 178-180;
the V_{H}CDR1, a V_{H}CDR2, and V_{H}CDR3 regions respectively comprise SEQ ID NOs: 181-183; and the V_{L}CDR1, V_{L}CDR2, and V_{L}CDR3 regions respectively comprise SEQ ID NOs: 184-186;
the V_{H}CDR1, a V_{H}CDR2, and V_{H}CDR3 regions respectively comprise SEQ ID NOs: 187-189; and the V_{L}CDR1, V_{L}CDR2, and V_{L}CDR3 regions respectively comprise SEQ ID NOs: 190-192;
the V_{H}CDR1, a V_{H}CDR2, and V_{H}CDR3 regions respectively comprise SEQ ID NOs: 193-195; and the V_{L}CDR1, V_{L}CDR2, and V_{L}CDR3 regions respectively comprise SEQ ID NOs: 196-198;
the V_{H}CDR1, a V_{H}CDR2, and V_{H}CDR3 regions respectively comprise SEQ ID NOs: 199-201; and the V_{L}CDR1, V_{L}CDR2, and V_{L}CDR3 regions respectively comprise SEQ ID NOs: 202-204;
the V_{H}CDR1, a V_{H}CDR2, and V_{H}CDR3 regions respectively comprise SEQ ID NOs: 205-207; and the V_{L}CDR1, V_{L}CDR2, and V_{L}CDR3 regions respectively comprise SEQ ID NOs: 208-210;
the V_{H}CDR1, a V_{H}CDR2, and V_{H}CDR3 regions respectively comprise SEQ ID NOs: 211-213; and the V_{L}CDR1, V_{L}CDR2, and V_{L}CDR3 regions respectively comprise SEQ ID NOs: 214-216;
the V_{H}CDR1, a V_{H}CDR2, and V_{H}CDR3 regions respectively comprise SEQ ID NOs: 217-219; and the V_{L}CDR1, V_{L}CDR2, and V_{L}CDR3 regions respectively comprise SEQ ID NOs: 220-222;
the V_{H}CDR1, a V_{H}CDR2, and V_{H}CDR3 regions respectively comprise SEQ ID NOs: 223-225; and the V_{L}CDR1, V_{L}CDR2, and V_{L}CDR3 regions respectively comprise SEQ ID NOs: 226-228;
the V_{H}CDR1, a V_{H}CDR2, and V_{H}CDR3 regions respectively comprise SEQ ID NOs: 229-231; and the V_{L}CDR1, V_{L}CDR2, and V_{L}CDR3 regions respectively comprise SEQ ID NOs: 232-234;
the V_{H}CDR1, a V_{H}CDR2, and V_{H}CDR3 regions respectively comprise SEQ ID NOs: 235-237; and the V_{L}CDR1, V_{L}CDR2, and V_{L}CDR3 regions respectively comprise SEQ ID NOs: 238-240;
the V_{H}CDR1, a V_{H}CDR2, and V_{H}CDR3 regions respectively comprise SEQ ID NOs: 241-243; and the V_{L}CDR1, V_{L}CDR2, and V_{L}CDR3 regions respectively comprise SEQ ID NOs: 244-246;
the V_{H}CDR1, a V_{H}CDR2, and V_{H}CDR3 regions respectively comprise SEQ ID NOs: 247-249; and the V_{L}CDR1, V_{L}CDR2, and V_{L}CDR3 regions respectively comprise SEQ ID NOs: 250-252;
the V_{H}CDR1, a V_{H}CDR2, and V_{H}CDR3 regions respectively comprise SEQ ID NOs: 253-255; and the V_{L}CDR1, V_{L}CDR2, and V_{L}CDR3 regions respectively comprise SEQ ID NOs: 256-258;
the V_{H}CDR1, a V_{H}CDR2, and V_{H}CDR3 regions respectively comprise SEQ ID NOs: 259-261; and the V_{L}CDR1, V_{L}CDR2, and V_{L}CDR3 regions respectively comprise SEQ ID NOs: 262-264; or
the V_{H}CDR1, a V_{H}CDR2, and V_{H}CDR3 regions respectively comprise SEQ ID NOs: 265-267; and the V_{L}CDR1, V_{L}CDR2, and V_{L}CDR3 regions respectively comprise SEQ ID NOs: 268-270,
including variants thereof that have 1, 2, 3, 4, 5, or 6 total alterations in one or more of the CDR regions and which specifically bind to the denatured human collagen polypeptide at the cryptic collagen epitope.

7. The fusion protein of claim 5 or 6, wherein for (a):
the heavy chain is at least 80, 85, 90, 95, 97, 98, 99, or 100% identical to a sequence selected from Table A2, including wherein the heavy chain has 1, 2, 3, 4, 5, or 6 alterations in one or more framework regions, and
the light chain is at least 80, 85, 90, 95, 97, 98, 99, or 100% identical to a sequence selected from Table A2, including wherein the light chain has 1, 2, 3, 4, 5, or 6 alterations in one or more framework regions.

8. The fusion protein of claim 7, wherein for (a):
the heavy chain comprises a sequence at least 80, 85, 90, 95, 97, 98, 99, or 100% identical to SEQ ID NO: 271, and the light chain comprises a sequence at least 80, 85, 90, 95, 97, 98, 99, or 100% identical to SEQ ID NO: 272;
the heavy chain comprises a sequence at least 80, 85, 90, 95, 97, 98, 99, or 100% identical to SEQ ID NO: 273, and the light chain comprises a sequence at least 80, 85, 90, 95, 97, 98, 99, or 100% identical to SEQ ID NO: 274;
the heavy chain comprises a sequence at least 80, 85, 90, 95, 97, 98, 99, or 100% identical to SEQ ID NO: 275, and the light chain comprises a sequence at least 80, 85, 90, 95, 97, 98, 99, or 100% identical to SEQ ID NO: 276;
the heavy chain comprises a sequence at least 80, 85, 90, 95, 97, 98, 99, or 100% identical to SEQ ID NO: 277, and the light chain comprises a sequence at least 80, 85, 90, 95, 97, 98, 99, or 100% identical to SEQ ID NO: 278;
the heavy chain comprises a sequence at least 80, 85, 90, 95, 97, 98, 99, or 100% identical to SEQ ID NO: 279, and the light chain comprises a sequence at least 80, 85, 90, 95, 97, 98, 99, or 100% identical to SEQ ID NO: 280;
the heavy chain comprises a sequence at least 80, 85, 90, 95, 97, 98, 99, or 100% identical to SEQ ID NO: 281, and the light chain comprises a sequence at least 80, 85, 90, 95, 97, 98, 99, or 100% identical to SEQ ID NO: 282;
the heavy chain comprises a sequence at least 80, 85, 90, 95, 97, 98, 99, or 100% identical to SEQ ID NO: 283, and the light chain comprises a sequence at least 80, 85, 90, 95, 97, 98, 99, or 100% identical to SEQ ID NO: 284;
the heavy chain comprises a sequence at least 80, 85, 90, 95, 97, 98, 99, or 100% identical to SEQ ID NO: 285, and the light chain comprises a sequence at least 80, 85, 90, 95, 97, 98, 99, or 100% identical to SEQ ID NO: 286;
the heavy chain comprises a sequence at least 80, 85, 90, 95, 97, 98, 99, or 100% identical to SEQ ID NO: 287, and the light chain comprises a sequence at least 80, 85, 90, 95, 97, 98, 99, or 100% identical to SEQ ID NO: 288;
the heavy chain comprises a sequence at least 80, 85, 90, 95, 97, 98, 99, or 100% identical to SEQ ID NO: 289, and the light chain comprises a sequence at least 80, 85, 90, 95, 97, 98, 99, or 100% identical to SEQ ID NO: 290;
the heavy chain comprises a sequence at least 80, 85, 90, 95, 97, 98, 99, or 100% identical to SEQ ID NO: 291, and the light chain comprises a sequence at least 80, 85, 90, 95, 97, 98, 99, or 100% identical to SEQ ID NO: 292;
the heavy chain comprises a sequence at least 80, 85, 90, 95, 97, 98, 99, or 100% identical to SEQ ID NO: 293, and the light chain comprises a sequence at least 80, 85, 90, 95, 97, 98, 99, or 100% identical to SEQ ID NO: 294;
the heavy chain comprises a sequence at least 80, 85, 90, 95, 97, 98, 99, or 100% identical to SEQ ID NO: 295, and the light chain comprises a sequence at least 80, 85, 90, 95, 97, 98, 99, or 100% identical to SEQ ID NO: 296;
the heavy chain comprises a sequence at least 80, 85, 90, 95, 97, 98, 99, or 100% identical to SEQ ID NO: 297, and the light chain comprises a sequence at least 80, 85, 90, 95, 97, 98, 99, or 100% identical to SEQ ID NO: 298;
the heavy chain comprises a sequence at least 80, 85, 90, 95, 97, 98, 99, or 100% identical to SEQ ID NO: 299, and the light chain comprises a sequence at least 80, 85, 90, 95, 97, 98, 99, or 100% identical to SEQ ID NO: 300;
the heavy chain comprises a sequence at least 80, 85, 90, 95, 97, 98, 99, or 100% identical to SEQ ID NO: 301, and the light chain comprises a sequence at least 80, 85, 90, 95, 97, 98, 99, or 100% identical to SEQ ID NO: 302;
the heavy chain comprises a sequence at least 80, 85, 90, 95, 97, 98, 99, or 100% identical to SEQ ID NO: 303, and the light chain comprises a sequence at least 80, 85, 90, 95, 97, 98, 99, or 100% identical to SEQ ID NO: 304;
the heavy chain comprises a sequence at least 80, 85, 90, 95, 97, 98, 99, or 100% identical to SEQ ID NO: 305, and the light chain comprises a sequence at least 80, 85, 90, 95, 97, 98, 99, or 100% identical to SEQ ID NO: 306;
the heavy chain comprises a sequence at least 80, 85, 90, 95, 97, 98, 99, or 100% identical to SEQ ID NO: 307, and the light chain comprises a sequence at least 80, 85, 90, 95, 97, 98, 99, or 100% identical to SEQ ID NO: 308;
the heavy chain comprises a sequence at least 80, 85, 90, 95, 97, 98, 99, or 100% identical to SEQ ID NO: 309, and the light chain comprises a sequence at least 80, 85, 90, 95, 97, 98, 99, or 100% identical to SEQ ID NO: 310;
the heavy chain comprises a sequence at least 80, 85, 90, 95, 97, 98, 99, or 100% identical to SEQ ID NO: 311, and the light chain comprises a sequence at least 80, 85, 90, 95, 97, 98, 99, or 100% identical to SEQ ID NO: 312;
the heavy chain comprises a sequence at least 80, 85, 90, 95, 97, 98, 99, or 100% identical to SEQ ID NO: 313, and the light chain comprises a sequence at least 80, 85, 90, 95, 97, 98, 99, or 100% identical to SEQ ID NO: 314;
the heavy chain comprises a sequence at least 80, 85, 90, 95, 97, 98, 99, or 100% identical to SEQ ID NO: 315, and the light chain comprises a sequence at least 80, 85, 90, 95, 97, 98, 99, or 100% identical to SEQ ID NO: 316;
the heavy chain comprises a sequence at least 80, 85, 90, 95, 97, 98, 99, or 100% identical to SEQ ID NO: 317, and the light chain comprises a sequence at least 80, 85, 90, 95, 97, 98, 99, or 100% identical to SEQ ID NO: 318;
the heavy chain comprises a sequence at least 80, 85, 90, 95, 97, 98, 99, or 100% identical to SEQ ID NO: 319, and the light chain comprises a sequence at least 80, 85, 90, 95, 97, 98, 99, or 100% identical to SEQ ID NO: 320;
the heavy chain comprises a sequence at least 80, 85, 90, 95, 97, 98, 99, or 100% identical to SEQ ID NO: 321, and the light chain comprises a sequence at least 80, 85, 90, 95, 97, 98, 99, or 100% identical to SEQ ID NO: 322;
the heavy chain comprises a sequence at least 80, 85, 90, 95, 97, 98, 99, or 100% identical to SEQ ID NO: 323, and the light chain comprises a sequence at least 80, 85, 90, 95, 97, 98, 99, or 100% identical to SEQ ID NO: 324;
the heavy chain comprises a sequence at least 80, 85, 90, 95, 97, 98, 99, or 100% identical to SEQ ID NO: 325, and the light chain comprises a sequence at least 80, 85, 90, 95, 97, 98, 99, or 100% identical to SEQ ID NO: 326;
the heavy chain comprises a sequence at least 80, 85, 90, 95, 97, 98, 99, or 100% identical to SEQ ID NO: 327, and the light chain comprises a sequence at least 80, 85, 90, 95, 97, 98, 99, or 100% identical to SEQ ID NO: 328;
the heavy chain comprises a sequence at least 80, 85, 90, 95, 97, 98, 99, or 100% identical to SEQ ID NO: 329, and the light chain comprises a sequence at least 80, 85, 90, 95, 97, 98, 99, or 100% identical to SEQ ID NO: 330;
the heavy chain comprises a sequence at least 80, 85, 90, 95, 97, 98, 99, or 100% identical to SEQ ID NO: 331, and the light chain comprises a sequence at least 80, 85, 90, 95, 97, 98, 99, or 100% identical to SEQ ID NO: 332;
the heavy chain comprises a sequence at least 80, 85, 90, 95, 97, 98, 99, or 100% identical to SEQ ID NO: 333, and the light chain comprises a sequence at least 80, 85, 90, 95, 97, 98, 99, or 100% identical to SEQ ID NO: 334;
the heavy chain comprises a sequence at least 80, 85, 90, 95, 97, 98, 99, or 100% identical to SEQ ID NO: 335, and the light chain comprises a sequence at least 80, 85, 90, 95, 97, 98, 99, or 100% identical to SEQ ID NO: 336;
the heavy chain comprises a sequence at least 80, 85, 90, 95, 97, 98, 99, or 100% identical to SEQ ID NO: 337, and the light chain comprises a sequence at least 80, 85, 90, 95, 97, 98, 99, or 100% identical to SEQ ID NO: 338;
the heavy chain comprises a sequence at least 80, 85, 90, 95, 97, 98, 99, or 100% identical to SEQ ID NO: 339, and the light chain comprises a sequence at least 80, 85, 90, 95, 97, 98, 99, or 100% identical to SEQ ID NO: 340;
the heavy chain comprises a sequence at least 80, 85, 90, 95, 97, 98, 99, or 100% identical to SEQ ID NO: 341, and the light chain comprises a sequence at least 80, 85, 90, 95, 97, 98, 99, or 100% identical to SEQ ID NO: 342;
the heavy chain comprises a sequence at least 80, 85, 90, 95, 97, 98, 99, or 100% identical to SEQ ID NO: 343, and the light chain comprises a sequence at least 80, 85, 90, 95, 97, 98, 99, or 100% identical to SEQ ID NO: 344;
the heavy chain comprises a sequence at least 80, 85, 90, 95, 97, 98, 99, or 100% identical to SEQ ID NO: 345, and the light chain comprises a sequence at least 80, 85, 90, 95, 97, 98, 99, or 100% identical to SEQ ID NO: 346;
the heavy chain comprises a sequence at least 80, 85, 90, 95, 97, 98, 99, or 100% identical to SEQ ID NO: 347, and the light chain comprises a sequence at least 80, 85, 90, 95, 97, 98, 99, or 100% identical to SEQ ID NO: 348;
the heavy chain comprises a sequence at least 80, 85, 90, 95, 97, 98, 99, or 100% identical to SEQ ID NO: 349, and the light chain comprises a sequence at least 80, 85, 90, 95, 97, 98, 99, or 100% identical to SEQ ID NO: 350;
the heavy chain comprises a sequence at least 80, 85, 90, 95, 97, 98, 99, or 100% identical to SEQ ID NO: 351, and the light chain comprises a sequence at least 80, 85, 90, 95, 97, 98, 99, or 100% identical to SEQ ID NO: 352;
the heavy chain comprises a sequence at least 80, 85, 90, 95, 97, 98, 99, or 100% identical to SEQ ID NO: 353, and the light chain comprises a sequence at least 80, 85, 90, 95, 97, 98, 99, or 100% identical to SEQ ID NO: 354; or
the heavy chain comprises a sequence at least 80, 85, 90, 95, 97, 98, 99, or 100% identical to SEQ ID NO: 355, and the light chain comprises a sequence at least 80, 85, 90, 95, 97, 98, 99, or 100% identical to SEQ ID NO: 356.

9. The fusion protein of any one of claims 1-4, wherein (a) comprises
a V_{H} region or heavy chain comprising:
an HFR1 sequence selected from SEQ ID NOs: 357-361;
an HFR2 sequence selected from SEQ ID NOs: 362-366;
an HFR3 sequence selected from SEQ ID NOs: 367-369;
an HFR4 sequence set forth in SEQ ID NO: 370;
a V_{H}CDR1 sequence selected from SEQ ID NOs: 371-372;
a V_{H}CDR2 sequence selected from SEQ ID NOs: 373-374; and
a V_{H}CDR3 sequence selected from SEQ ID NO: 375,
and/or a V_{L} region or light chain comprising:
an LFR1 sequence set forth in SEQ ID NO: 376;
an LFR2 sequence set forth in SEQ ID NO: 377;
an LFR3 sequence set forth in SEQ ID NO: 378;
an LFR4 sequence set forth in SEQ ID NO: 379;
a V_{L}CDR1 sequence selected from SEQ ID NOs: 380-385;
a V_{L}CDR2 sequence set forth in SEQ ID NO: 386; and
a V_{L}CDR3 sequence selected from SEQ ID NOs: 387-388,
wherein the antibody, or antigen-binding fragment thereof, specifically binds to a human denatured collagen, or wherein (a) comprises
an HFR1 sequence selected from SEQ ID NOs: 389-390;
an HFR2 sequence selected from SEQ ID NOs: 391-392;
an HFR3 sequence set forth in SEQ ID NO: 393;
an HFR4 sequence set forth in SEQ ID NO: 394;
a V_{H}CDR1 sequence selected from SEQ ID NOs: 395-397;
a V_{H}CDR2 sequence selected from SEQ ID NOs: 398-401; and
a V_{H}CDR3 sequence selected from SEQ ID NOs: 402-405,
and/or a VL region or light chain comprising:
an LFR1 sequence set forth in SEQ ID NO: 406;
an LFR2 sequence set forth in SEQ ID NO: 407;
an LFR3 sequence set forth in SEQ ID NO: 408;
an LFR4 sequence set forth in SEQ ID NO: 409;
a V_{L}CDR1 sequence selected from SEQ ID NOs: 410-412;
a V_{L}CDR2 set forth in SEQ ID NO: 413; and
a V_{L}CDR3 set forth in SEQ ID NO: 414,
wherein the antibody, or antigen-binding fragment thereof, specifically binds to a human denatured collagen.

10. The fusion protein of any one of claims 1-9, wherein (b) the effector domain comprises an immune cell-stimulatory ligand or domain, an immune cell-inhibitory ligand or domain, a cytocidal (e.g., tumor cell cytocidal) ligand or domain, or an immunomodulatory or anti-cancer antibody, or antigen-binding fragment thereof.

11. The fusion protein of claim 10, wherein the effector domain is an IL-2 polypeptide, optionally an IL-2 polypeptide that comprises, consists, or consists essentially of an amino acid sequence that is at least 80, 85, 90, 95, 98, or 100% identical to a sequence selected from Table S1, and wherein the cell receptor is an IL-2Rβ/γc and/or IL-2Rα/β/γc chain present on the surface of an immune cell.

12. The fusion protein of claim 10, wherein the effector domain is an IL-15 polypeptide, optionally an IL-15 polypeptide that comprises, consists, or consists essentially of an amino acid sequence that is at least 80, 85, 90, 95, 98, or 100% identical to a sequence selected from Table S2, and wherein the cell receptor is an IL-15Rβ/γc chain present on the surface of an immune cell.

13. The fusion protein of claim 10, wherein the effector domain is a hybrid IL-2/IL-15 polypeptide, optionally a hybrid IL-2/IL-15 polypeptide that comprises, consists, or consists essentially of an amino acid sequence that is at least 80, 85, 90, 95, 98, or 100% identical to a sequence selected from Table S3, and wherein the cell receptor is an IL-2Rβ/γc chain, an IL-2Rα/β/γc chain, and/or an IL-15Rβ/γc chain present on the surface of an immune cell.

14. The fusion protein of claim 10, wherein the effector domain is a TNF superfamily ligand polypeptide, optionally wherein the TNF superfamily ligand polypeptide and its corresponding cell receptor(s) are selected from Table T1, optionally wherein:
(i) the TNF superfamily ligand polypeptide is TRAIL, including single chain trimeric TRAIL, and the cell receptor is selected from Death receptor 4, Death receptor 5, Decoy receptor 1, and decoy receptor 2 present on an immune cell or cancer cell; or
(ii) the TNF superfamily ligand polypeptide is 4-1BBL, including single chain trimeric 4-1BB, and the cell receptor is 4-1BB (CD137) present on an immune cell or cancer cell.

15. The fusion protein of claim 14, wherein the TNF superfamily ligand polypeptide comprises, consists, or consists essentially of an amino acid sequence that is at least 80, 85, 90, 95, 98, or 100% identical to a sequence selected from Table S4, and wherein the cell receptor is selected from the corresponding receptor from Table T1.

16. The fusion protein of claim 10, wherein the effector domain is an IL-12 polypeptide, optionally an IL-12 polypeptide that comprises, consists, or consists essentially of an amino acid sequence that is at least 80, 85, 90, 95, 98, or 100% identical to a sequence selected from Table S5, and wherein the cell receptor is an IL-12 receptor, optionally an IL-12Rβ1 and IL-12Rβ2 chain present on the surface of an immune cell.

17. The fusion protein of claim 10, wherein the effector domain is an IL-10 polypeptide, optionally an IL-10 polypeptide that comprises, consists, or consists essentially of an amino acid sequence that is at least 80, 85, 90, 95, 98, or 100% identical to a sequence selected from Table S6, and wherein the cell receptor is an IL-10 receptor complex comprising IL-10α receptor and IL-10βreceptor subunits, optionally wherein the cell receptor is an IL-10α receptor subunit.

18. The fusion protein of claim 10, wherein the effector domain is an IFN-α polypeptide, optionally an IFN-α polypeptide that comprises, consists, or consists essentially of an amino acid sequence that is at least 80, 85, 90, 95, 98, or 100% identical to a sequence selected from Table S7, and wherein the cell receptor is an interferon α/β receptor.

19. The fusion protein of claim 10, wherein the effector domain is an interleukin-7 (IL-7) polypeptide, optionally an IL-7 polypeptide that comprises, consists, or consists essentially of an amino acid sequence that is at least 80, 85, 90, 95, 98, or 100% identical to a sequence selected from Table S8, and wherein the cell receptor is an IL-7 receptor (IL-7R); or wherein the effector domain is an interleukin-21 (IL-21) polypeptide, optionally an IL-7 polypeptide that comprises, consists, or consists essentially of an amino acid sequence that is at least 80, 85, 90, 95, 98, or 100% identical to a sequence selected from Table S9, and wherein the cell receptor is an IL-21 receptor (IL-21R).

20. The fusion protein of claim 10, wherein the effector domain comprises an immunomodulatory or anti-cancer antibody, or antigen-binding fragment thereof, which specifically binds to a polypeptide selected from human Her2/neu, Her1/EGF receptor (EGFR), EGFR1, EGFR2, EGFR3, Her3, A33 antigen, B7H3, B7H4, CD3, CD4, CD5, CD8, CD16, CD19, CD20, CD30, CD22, CD23 (IgE Receptor), B-cell maturation antigen (BCMA), Trop-2, Claudin 6, claudin 16, MAGE-3, C242 antigen, 5T4, IL-6, IL-13, PD-1, CTLA-4, PD-L1, TIGIT, TIM-3, LAG-3, 4-1BB, vascular endothelial growth factor VEGF (e.g., VEGF-A) VEGFR-1, VEGFR-2, CD27, CD28, CD33, CD37, CD40, CD44, CD51, CD52, CD56, CD74, CD80, CD86, CD137, CD152, CD200, CD221, CCR4, HLA-DR, CTLA-4, NPC-1C, Siglec15, MIC-A, NKG2A, NKG2D, Nkp30, NKp46, tenascin, vimentin, insulin-like growth factor 1 receptor (IGF-1R), alpha-fetoprotein, insulin-like growth factor 1 (IGF-1), carbonic anhydrase 9 (CA-IX), carcinoembryonic antigen (CEA), guanylyl cyclase C, NY-ESO-1, p53, survivin, integrin αvβ3, integrin α5β1, folate receptor 1, transmembrane glycoprotein NMB, fibroblast activation protein alpha (FAP), glycoprotein 75, TAG-72, MUC1, MUC16 (or CA-125), phosphatidylserine, prostate-specific membrane antigen (PSMA), NR-LU-13 antigen, SLAM family member 7 (SLAMF7), EGP40 pancarcinoma antigen, B-cell activating factor (BAFF), platelet-derived growth factor receptor, glycoprotein EpCAM (17-1A), Programmed Death-1, protein disulfide isomerase (PDI), Phosphatase of Regenerating Liver 3 (PRL-3), prostatic acid phosphatase, Lewis-Y antigen, GD2 (a disialoganglioside expressed on tumors of neuroectodermal origin), glypican-3 (GPC3), and mesothelin.

21. The fusion protein of any one of claims 1-20, wherein (b) is fused via the linker to the N-terminus of the V_{H} region of (a).

22. The fusion protein of any one of claims 1-20, wherein (b) is fused via the linker to the N-terminus of the V_{L} region of (a).

23. The fusion protein of any one of claims 1-20, wherein (b) is fused via the linker to the C-terminus of (a), optionally the C-terminus of an Fc region of (a).

24. The fusion protein of any one of claims 1-23, wherein the linker is a flexible, stable linker, optionally selected from Table L1.

25. The fusion protein of any one of claims 1-23, wherein the linker is a flexible, cleavable linker, optionally selected from Table L2.

26. The fusion protein of claim 25, wherein the cleavable linker comprises a protease cleavage site, or is a low pH-sensitive linker.

27. The fusion protein of claim 26, wherein the protease cleavage site is cleavable by a protease selected from one or more of a metalloprotease, a serine protease, a cysteine protease, and an aspartic acid protease.

28. The fusion protein of claim 25 or 26, wherein the protease cleavage site is cleavable by a protease selected from one or more of MMP1, MMP2, MMP3, MMP4, MMP5, MMP6, MMP7, MMP8, MMP9, MMP10, MMP11, MMP12, MMP13, MMP14, TEV protease, matriptase, uPA, FAP, Legumain, PSA, Kallikrein, Cathepsin A, and Cathepsin B.

29. The fusion protein of any one of claims 1-28, wherein the linker is about 1-50 1-40, 1-30, 1-20, 1-10, 1-5, 1-4, 1-3 amino acids in length, or about 1, 2, 3, 4, 5, 6, 7, 8, 9, 10, 11, 12, 13, 14, 15, 16, 17, 18, 19, 20, 21, 22, 23, 24, 25, 26, 27, 28, 29, 30, 31, 32, 33, 34, 35, 36, 37, 38, 39, 40, 41, 42, 43, 44, 45, 46, 47, 48, 49, 50 amino acids in length.

30. The fusion protein of any one of claims 1-29, wherein binding of (a) to high density denatured collagen in a tissue in vivo, optionally a cancer tissue, increases binding of (b) to its target cell surface receptor or ligand, optionally by about or at least about 10%, 20%, 30%, 40%, 50%, 60%, 70%, 80%, 90%, 100%, 200%, 300%, 400%, 500%, 1000%, 2000%, 3000%, 4000%, or 5000% or more, relative to a control such as the absence or reduced levels of high density denatured collagen.

31. The fusion protein of claim 30, wherein the cell surface receptor is on the surface of an immune cell or a cancer cell, optionally wherein the immune cell is selected from one or more of a T cell, a B cell, a natural killer cell, a monocyte, and a macrophage.

32. The fusion protein of any one of claims 1-31, wherein the antibody, or antigen-binding fragment thereof, is a monoclonal antibody and/or a humanized antibody, including wherein the antibody, or antigen-binding fragment thereof, is a whole antibody, a fragment antigen-binding domain (Fab), a F(ab′)2 domain, a single-chain variable fragment (scFv), a dimeric single-chain variable fragment (di-scFv), a single domain antibody (sdAb), or a bi-specific antibody.

33. The fusion protein of any one of claims 1-32, wherein the fusion protein, optionally bispecific antibody, comprises, consists, or consists essentially of an amino acid sequence at least 80, 85, 90, 95, 97, 98, 99, or 100% identical to a sequence selected from Table S10.

34. A recombinant nucleic acid molecule encoding the fusion protein of any one of claims 1-33.

35. A vector comprising the recombinant nucleic acid molecule of claim 34.

36. A host cell comprising the recombinant nucleic acid molecule of claim 34 and/or the vector of claim 35.

37. A method of producing a fusion protein, comprising culturing the host cell of claim 36 under culture conditions suitable for the expression of the fusion protein, and isolating the fusion protein from the culture.

38. A pharmaceutical composition, comprising the fusion protein of any one of claims 1-33, and a pharmaceutically acceptable carrier.

39. A method of treating disease in a subject in need thereof, comprising administering to the subject a therapeutically effective amount of the pharmaceutical composition of claim 38.

40. The method of claim 39, wherein the disease is selected from one or more of a cancer, a viral infection, and an immune disorder.

41. The method of claim 40, wherein the cancer is a primary cancer or a metastatic cancer, and is selected from one or more of melanoma (optionally metastatic melanoma), kidney cancer (optionally renal cell carcinoma), pancreatic cancer, bone cancer, prostate cancer, small cell lung cancer, non-small cell lung cancer (NSCLC), mesothelioma, leukemia (optionally lymphocytic leukemia, chronic myelogenous leukemia, acute myeloid leukemia, or relapsed acute myeloid leukemia), multiple myeloma, lymphoma, hepatoma (hepatocellular carcinoma), sarcoma, B-cell malignancy, breast cancer, ovarian cancer, colorectal cancer, glioma, glioblastoma multiforme, meningioma, pituitary adenoma, vestibular schwannoma, primary CNS lymphoma, primitive neuroectodermal tumor (medulloblastoma), bladder cancer, uterine cancer, esophageal cancer, brain cancer, head and neck cancers, cervical cancer, testicular cancer, thyroid cancer, and stomach cancer.

42. The method of claim 39, wherein the viral infection is selected from one or more of human immunodeficiency virus (HIV), hepatitis A, hepatitis B, hepatitis C, hepatitis E, caliciviruses associated diarrhoea, rotavirus diarrhoea, Haemophilus influenzae B pneumonia and invasive disease, influenza, measles, mumps, rubella, parainfluenza associated pneumonia, respiratory syncytial virus (RSV) pneumonia, severe acute respiratory syndrome (SARS), human papillomavirus, herpes simplex type 2 genital ulcers, dengue fever, Japanese encephalitis, tick-borne encephalitis, West-Nile virus associated disease, yellow fever, Epstein-Barr virus, Lassa fever, Crimean-Congo haemorrhagic fever, Ebola haemorrhagic fever, Marburg haemorrhagic fever, Rabies, Rift Valley fever, smallpox, upper and lower respiratory infections, and poliomyelitis, optionally wherein the subject is HIV-positive.

43. The method of claim 40, wherein the effector domain has immune cell-stimulating activity, and wherein immune disorder is selected from one or more of type 1 diabetes, vasculitis, and an immunodeficiency.

44. The method of claim 40, wherein the effector domain has immune cell-inhibitory activity, and wherein the immune disorder is an autoimmune and/or inflammatory disease, optionally multiple sclerosis.

45. The method of any one of claims 39-44, wherein following administration, binding of (a) to high density denatured collagen in a tissue in vivo, optionally a cancer tissue, increases binding of the effector domain to its target cell surface receptor or ligand, optionally by about or at least about 10%, 20%, 30%, 40%, 50%, 60%, 70%, 80%, 90%, 100%, 200%, 300%, 400%, 500%, 1000%, 2000%, 3000%, 4000%, or 5000% or more, relative to a control such as the absence or reduced levels of high density denatured collagen

46. The method of claim 45, wherein the cell surface receptor is on the surface of an immune cell or a cancer cell, optionally wherein the immune cell is selected from one or more of a T cell, a B cell, a natural killer cell, a monocyte, and a macrophage.

47. The method of any one of claims 39-46, wherein the effector domain has immune cell-stimulatory activity, and wherein administration of the fusion protein increases an immune response in the subject by about or at least about 5, 10, 15, 20, 25, 30, 35, 40, 45, 50, 60, 70, 80, 90, 100, 200, 300, 400, 500, 600, 700, 800, 900, 1000, 2000% or more, relative to a control, optionally wherein the immune response is an anti-cancer or anti-viral immune response.

48. The method of any one of claims 39-47, wherein the effector domain has immune cell-stimulatory activity or cytocidal activity, and wherein administration of the fusion protein increases cell-killing in the subject by about or at least about 5, 10, 15, 20, 25, 30, 35, 40, 45, 50, 60, 70, 80, 90, 100, 200, 300, 400, 500, 600, 700, 800, 900, 1000, 2000% or more, relative to a control, optionally wherein the cell-killing is cancer cell-killing or virally-infected cell-killing.

49. The method of any one of claims 39-46, wherein the effector domain has immune cell-inhibitory activity, and wherein administration of the fusion protein reduces an immune response in the subject by about or at least about 5, 10, 15, 20, 25, 30, 35, 40, 45, 50, 60, 70, 80, 90, 100, 200, 300, 400, 500, 600, 700, 800, 900, 1000, 2000% or more, relative to a control, optionally wherein the immune response is associated with an inflammatory and/or autoimmune disease.

50. The method of any one of claims 39-49, wherein the pharmaceutical composition is administered to the subject by parenteral administration.

51. The method of claim 50, wherein the parenteral administration is intravenous administration.

52. Use of a pharmaceutical composition of claim 38 in the preparation of a medicament for treating a disease in a subject, optionally wherein the disease is a cancer, a viral infection, or an immune disorder, optionally type 1 diabetes, vasculitis, an immunodeficiency, an inflammatory disease, or an autoimmune disease.

53. A pharmaceutical composition of claim 38 for use in treating a disease in a subject, optionally wherein the disease is a cancer, a viral infection, or an immune disorder, optionally type 1 diabetes, vasculitis, an immunodeficiency, an inflammatory disease, or an autoimmune disease.

54. An isolated antibody, or an antigen-binding fragment thereof, which specifically binds to a denatured human collagen type I, II, III, IV, and/or V polypeptide at a cryptic collagen epitope, and comprises,
a heavy chain variable (V_{H}) region that comprises complementary determining region V_{H}CDR1, V_{H}CDR2, and V_{H}CDR3 sequences selected from Table A1 and variants thereof which specifically bind to the human collagen polypeptide at the cryptic collagen epitope; and
a light chain variable (V_{L}) region that comprises complementary determining region V_{L}CDR1, V_{L}CDR2, and V_{L}CDR3 sequences selected from Table A1 and variants thereof which specifically bind to the human collagen polypeptide at the cryptic collagen epitope,
excluding the HU177 and HUIV26.

55. The isolated antibody, or antigen-binding fragment thereof, of claim 54, wherein
the V_{H}CDR1, a V_{H}CDR2, and V_{H}CDR3 regions respectively comprise SEQ ID NOs: 1-3; and the V_{L}CDR1, V_{L}CDR2, and V_{L}CDR3 regions respectively comprise SEQ ID NOs: 4-6;
the V_{H}CDR1, a V_{H}CDR2, and V_{H}CDR3 regions respectively comprise SEQ ID NOs: 7-9; and the V_{L}CDR1, V_{L}CDR2, and V_{L}CDR3 regions respectively comprise SEQ ID NOs: 10-12;
the V_{H}CDR1, a V_{H}CDR2, and V_{H}CDR3 regions respectively comprise SEQ ID NOs: 13-15; and the V_{L}CDR1, V_{L}CDR2, and V_{L}CDR3 regions respectively comprise SEQ ID NOs: 16-18;
the V_{H}CDR1, a V_{H}CDR2, and V_{H}CDR3 regions respectively comprise SEQ ID NOs: 19-21; and the V_{L}CDR1, V_{L}CDR2, and V_{L}CDR3 regions respectively comprise SEQ ID NOs: 22-24;
the V_{H}CDR1, a V_{H}CDR2, and V_{H}CDR3 regions respectively comprise SEQ ID NOs: 25-27; and the V_{L}CDR1, V_{L}CDR2, and V_{L}CDR3 regions respectively comprise SEQ ID NOs: 28-30;
the V_{H}CDR1, a V_{H}CDR2, and V_{H}CDR3 regions respectively comprise SEQ ID NOs: 31-33; and the V_{L}CDR1, V_{L}CDR2, and V_{L}CDR3 regions respectively comprise SEQ ID NOs: 34-36;
the V_{H}CDR1, a V_{H}CDR2, and V_{H}CDR3 regions respectively comprise SEQ ID NOs: 37-39; and the V_{L}CDR1, V_{L}CDR2, and V_{L}CDR3 regions respectively comprise SEQ ID NOs: 40-42;
the V_{H}CDR1, a V_{H}CDR2, and V_{H}CDR3 regions respectively comprise SEQ ID NOs: 43-45; and the V_{L}CDR1, V_{L}CDR2, and V_{L}CDR3 regions respectively comprise SEQ ID NOs: 46-48;
the V_{H}CDR1, a V_{H}CDR2, and V_{H}CDR3 regions respectively comprise SEQ ID NOs: 49-51; and the V_{L}CDR1, V_{L}CDR2, and V_{L}CDR3 regions respectively comprise SEQ ID NOs: 52-54;
the V_{H}CDR1, a V_{H}CDR2, and V_{H}CDR3 regions respectively comprise SEQ ID NOs: 55-57; and the V_{L}CDR1, V_{L}CDR2, and V_{L}CDR3 regions respectively comprise SEQ ID NOs: 58-60;
the V_{H}CDR1, a V_{H}CDR2, and V_{H}CDR3 regions respectively comprise SEQ ID NOs: 61-63; and the V_{L}CDR1, V_{L}CDR2, and V_{L}CDR3 regions respectively comprise SEQ ID NOs: 64-66;
the V_{H}CDR1, a V_{H}CDR2, and V_{H}CDR3 regions respectively comprise SEQ ID NOs: 67-69; and the V_{L}CDR1, V_{L}CDR2, and V_{L}CDR3 regions respectively comprise SEQ ID NOs: 70-72;
the V_{H}CDR1, a V_{H}CDR2, and V_{H}CDR3 regions respectively comprise SEQ ID NOs: 73-75; and the V_{L}CDR1, V_{L}CDR2, and V_{L}CDR3 regions respectively comprise SEQ ID NOs: 76-78;
the V_{H}CDR1, a V_{H}CDR2, and V_{H}CDR3 regions respectively comprise SEQ ID NOs: 79-81; and the V_{L}CDR1, V_{L}CDR2, and V_{L}CDR3 regions respectively comprise SEQ ID NOs: 82-84;
the V_{H}CDR1, a V_{H}CDR2, and V_{H}CDR3 regions respectively comprise SEQ ID NOs: 85-87; and the V_{L}CDR1, V_{L}CDR2, and V_{L}CDR3 regions respectively comprise SEQ ID NOs: 88-90;
the V_{H}CDR1, a V_{H}CDR2, and V_{H}CDR3 regions respectively comprise SEQ ID NOs: 91-93; and the V_{L}CDR1, V_{L}CDR2, and V_{L}CDR3 regions respectively comprise SEQ ID NOs: 94-96;
the V_{H}CDR1, a V_{H}CDR2, and V_{H}CDR3 regions respectively comprise SEQ ID NOs: 97-99; and the V_{L}CDR1, V_{L}CDR2, and V_{L}CDR3 regions respectively comprise SEQ ID NOs: 100-102;
the V_{H}CDR1, a V_{H}CDR2, and V_{H}CDR3 regions respectively comprise SEQ ID NOs: 103-105; and the V_{L}CDR1, V_{L}CDR2, and V_{L}CDR3 regions respectively comprise SEQ ID NOs: 106-108;
the V_{H}CDR1, a V_{H}CDR2, and V_{H}CDR3 regions respectively comprise SEQ ID NOs: 109-111; and the V_{L}CDR1, V_{L}CDR2, and V_{L}CDR3 regions respectively comprise SEQ ID NOs: 112-114;
the V_{H}CDR1, a V_{H}CDR2, and V_{H}CDR3 regions respectively comprise SEQ ID NOs: 115-117; and the V_{L}CDR1, V_{L}CDR2, and V_{L}CDR3 regions respectively comprise SEQ ID NOs: 118-120;
the V_{H}CDR1, a V_{H}CDR2, and V_{H}CDR3 regions respectively comprise SEQ ID NOs: 121-123; and the V_{L}CDR1, V_{L}CDR2, and V_{L}CDR3 regions respectively comprise SEQ ID NOs: 124-126;
the V_{H}CDR1, a V_{H}CDR2, and V_{H}CDR3 regions respectively comprise SEQ ID NOs: 127-129; and the V_{L}CDR1, V_{L}CDR2, and V_{L}CDR3 regions respectively comprise SEQ ID NOs: 130-132;
the V_{H}CDR1, a V_{H}CDR2, and V_{H}CDR3 regions respectively comprise SEQ ID NOs: 133-135; and the V_{L}CDR1, V_{L}CDR2, and V_{L}CDR3 regions respectively comprise SEQ ID NOs: 136-138;
the V_{H}CDR1, a V_{H}CDR2, and V_{H}CDR3 regions respectively comprise SEQ ID NOs: 139-141; and the V_{L}CDR1, V_{L}CDR2, and V_{L}CDR3 regions respectively comprise SEQ ID NOs: 142-144;
the V_{H}CDR1, a V_{H}CDR2, and V_{H}CDR3 regions respectively comprise SEQ ID NOs: 145-147; and the V_{L}CDR1, V_{L}CDR2, and V_{L}CDR3 regions respectively comprise SEQ ID NOs: 148-150;
the V_{H}CDR1, a V_{H}CDR2, and V_{H}CDR3 regions respectively comprise SEQ ID NOs: 151-153; and the V_{L}CDR1, V_{L}CDR2, and V_{L}CDR3 regions respectively comprise SEQ ID NOs: 154-156;
the V_{H}CDR1, a V_{H}CDR2, and V_{H}CDR3 regions respectively comprise SEQ ID NOs: 157-159; and the V_{L}CDR1, V_{L}CDR2, and V_{L}CDR3 regions respectively comprise SEQ ID NOs: 160-162;
the V_{H}CDR1, a V_{H}CDR2, and V_{H}CDR3 regions respectively comprise SEQ ID NOs: 163-165; and the V_{L}CDR1, V_{L}CDR2, and V_{L}CDR3 regions respectively comprise SEQ ID NOs: 166-168;
the V_{H}CDR1, a V_{H}CDR2, and V_{H}CDR3 regions respectively comprise SEQ ID NOs: 169-171; and the V_{L}CDR1, V_{L}CDR2, and V_{L}CDR3 regions respectively comprise SEQ ID NOs: 172-174;
the V_{H}CDR1, a V_{H}CDR2, and V_{H}CDR3 regions respectively comprise SEQ ID NOs: 175-177; and the V_{L}CDR1, V_{L}CDR2, and V_{L}CDR3 regions respectively comprise SEQ ID NOs: 178-180;
the V_{H}CDR1, a V_{H}CDR2, and V_{H}CDR3 regions respectively comprise SEQ ID NOs: 181-183; and the V_{L}CDR1, V_{L}CDR2, and V_{L}CDR3 regions respectively comprise SEQ ID NOs: 184-186;
the V_{H}CDR1, a V_{H}CDR2, and V_{H}CDR3 regions respectively comprise SEQ ID NOs: 187-189; and the V_{L}CDR1, V_{L}CDR2, and V_{L}CDR3 regions respectively comprise SEQ ID NOs: 190-192;
the V_{H}CDR1, a V_{H}CDR2, and V_{H}CDR3 regions respectively comprise SEQ ID NOs: 193-195; and the V_{L}CDR1, V_{L}CDR2, and V_{L}CDR3 regions respectively comprise SEQ ID NOs: 196-198;
the V_{H}CDR1, a V_{H}CDR2, and V_{H}CDR3 regions respectively comprise SEQ ID NOs: 199-201; and the V_{L}CDR1, V_{L}CDR2, and V_{L}CDR3 regions respectively comprise SEQ ID NOs: 202-204;
the V_{H}CDR1, a V_{H}CDR2, and V_{H}CDR3 regions respectively comprise SEQ ID NOs: 205-207; and the V_{L}CDR1, V_{L}CDR2, and V_{L}CDR3 regions respectively comprise SEQ ID NOs: 208-210;
the V_{H}CDR1, a V_{H}CDR2, and V_{H}CDR3 regions respectively comprise SEQ ID NOs: 211-213; and the V_{L}CDR1, V_{L}CDR2, and V_{L}CDR3 regions respectively comprise SEQ ID NOs: 214-216;
the V_{H}CDR1, a V_{H}CDR2, and V_{H}CDR3 regions respectively comprise SEQ ID NOs: 217-219; and the V_{L}CDR1, V_{L}CDR2, and V_{L}CDR3 regions respectively comprise SEQ ID NOs: 220-222;
the V_{H}CDR1, a V_{H}CDR2, and V_{H}CDR3 regions respectively comprise SEQ ID NOs: 223-225; and the V_{L}CDR1, V_{L}CDR2, and V_{L}CDR3 regions respectively comprise SEQ ID NOs: 226-228;
the V_{H}CDR1, a V_{H}CDR2, and V_{H}CDR3 regions respectively comprise SEQ ID NOs: 229-231; and the V_{L}CDR1, V_{L}CDR2, and V_{L}CDR3 regions respectively comprise SEQ ID NOs: 232-234;
the V_{H}CDR1, a V_{H}CDR2, and V_{H}CDR3 regions respectively comprise SEQ ID NOs: 235-237; and the V_{L}CDR1, V_{L}CDR2, and V_{L}CDR3 regions respectively comprise SEQ ID NOs: 238-240;
the V_{H}CDR1, a V_{H}CDR2, and V_{H}CDR3 regions respectively comprise SEQ ID NOs: 241-243; and the V_{L}CDR1, V_{L}CDR2, and V_{L}CDR3 regions respectively comprise SEQ ID NOs: 244-246;
the V_{H}CDR1, a V_{H}CDR2, and V_{H}CDR3 regions respectively comprise SEQ ID NOs: 247-249; and the V_{L}CDR1, V_{L}CDR2, and V_{L}CDR3 regions respectively comprise SEQ ID NOs: 250-252; or
the V_{H}CDR1, a V_{H}CDR2, and V_{H}CDR3 regions respectively comprise SEQ ID NOs: 253-255; and the V_{L}CDR1, V_{L}CDR2, and V_{L}CDR3 regions respectively comprise SEQ ID NOs: 256-258;
including variants thereof that have 1, 2, 3, 4, 5, or 6 total alterations in one or more of the CDR regions and specifically bind to the human collagen polypeptide at the cryptic collagen epitope.

56. The isolated antibody, or antigen-binding fragment thereof, of claim 55, wherein
the heavy chain is at least 80, 85, 90, 95, 97, 98, 99, or 100% identical to a sequence selected from Table A2, including wherein the heavy chain has 1, 2, 3, 4, 5, or 6 alterations in one or more framework regions, and
the light chain is at least 80, 85, 90, 95, 97, 98, 99, or 100% identical to a sequence selected from Table A2, including wherein the light chain has 1, 2, 3, 4, 5, or 6 alterations in one or more framework regions,
excluding the HU177 and HUIV26 antibodies.

57. The isolated antibody, or antigen-binding fragment thereof, of claim 56, wherein
the heavy chain comprises a sequence at least 80, 85, 90, 95, 97, 98, 99, or 100% identical to SEQ ID NO: 271, and the light chain comprises a sequence at least 80, 85, 90, 95, 97, 98, 99, or 100% identical to SEQ ID NO: 272;
the heavy chain comprises a sequence at least 80, 85, 90, 95, 97, 98, 99, or 100% identical to SEQ ID NO: 273, and the light chain comprises a sequence at least 80, 85, 90, 95, 97, 98, 99, or 100% identical to SEQ ID NO: 274;
the heavy chain comprises a sequence at least 80, 85, 90, 95, 97, 98, 99, or 100% identical to SEQ ID NO: 275, and the light chain comprises a sequence at least 80, 85, 90, 95, 97, 98, 99, or 100% identical to SEQ ID NO: 276;
the heavy chain comprises a sequence at least 80, 85, 90, 95, 97, 98, 99, or 100% identical to SEQ ID NO: 277, and the light chain comprises a sequence at least 80, 85, 90, 95, 97, 98, 99, or 100% identical to SEQ ID NO: 278;
the heavy chain comprises a sequence at least 80, 85, 90, 95, 97, 98, 99, or 100% identical to SEQ ID NO: 279, and the light chain comprises a sequence at least 80, 85, 90, 95, 97, 98, 99, or 100% identical to SEQ ID NO: 280;
the heavy chain comprises a sequence at least 80, 85, 90, 95, 97, 98, 99, or 100% identical to SEQ ID NO: 281, and the light chain comprises a sequence at least 80, 85, 90, 95, 97, 98, 99, or 100% identical to SEQ ID NO: 282;
the heavy chain comprises a sequence at least 80, 85, 90, 95, 97, 98, 99, or 100% identical to SEQ ID NO: 283, and the light chain comprises a sequence at least 80, 85, 90, 95, 97, 98, 99, or 100% identical to SEQ ID NO: 284;
the heavy chain comprises a sequence at least 80, 85, 90, 95, 97, 98, 99, or 100% identical to SEQ ID NO: 285, and the light chain comprises a sequence at least 80, 85, 90, 95, 97, 98, 99, or 100% identical to SEQ ID NO: 286;
the heavy chain comprises a sequence at least 80, 85, 90, 95, 97, 98, 99, or 100% identical to SEQ ID NO: 287, and the light chain comprises a sequence at least 80, 85, 90, 95, 97, 98, 99, or 100% identical to SEQ ID NO: 288;
the heavy chain comprises a sequence at least 80, 85, 90, 95, 97, 98, 99, or 100% identical to SEQ ID NO: 289, and the light chain comprises a sequence at least 80, 85, 90, 95, 97, 98, 99, or 100% identical to SEQ ID NO: 290;
the heavy chain comprises a sequence at least 80, 85, 90, 95, 97, 98, 99, or 100% identical to SEQ ID NO: 291, and the light chain comprises a sequence at least 80, 85, 90, 95, 97, 98, 99, or 100% identical to SEQ ID NO: 292;
the heavy chain comprises a sequence at least 80, 85, 90, 95, 97, 98, 99, or 100% identical to SEQ ID NO: 293, and the light chain comprises a sequence at least 80, 85, 90, 95, 97, 98, 99, or 100% identical to SEQ ID NO: 294;
the heavy chain comprises a sequence at least 80, 85, 90, 95, 97, 98, 99, or 100% identical to SEQ ID NO: 295, and the light chain comprises a sequence at least 80, 85, 90, 95, 97, 98, 99, or 100% identical to SEQ ID NO: 296;
the heavy chain comprises a sequence at least 80, 85, 90, 95, 97, 98, 99, or 100% identical to SEQ ID NO: 297, and the light chain comprises a sequence at least 80, 85, 90, 95, 97, 98, 99, or 100% identical to SEQ ID NO: 298;
the heavy chain comprises a sequence at least 80, 85, 90, 95, 97, 98, 99, or 100% identical to SEQ ID NO: 299, and the light chain comprises a sequence at least 80, 85, 90, 95, 97, 98, 99, or 100% identical to SEQ ID NO: 300;
the heavy chain comprises a sequence at least 80, 85, 90, 95, 97, 98, 99, or 100% identical to SEQ ID NO: 301, and the light chain comprises a sequence at least 80, 85, 90, 95, 97, 98, 99, or 100% identical to SEQ ID NO: 302;
the heavy chain comprises a sequence at least 80, 85, 90, 95, 97, 98, 99, or 100% identical to SEQ ID NO: 303, and the light chain comprises a sequence at least 80, 85, 90, 95, 97, 98, 99, or 100% identical to SEQ ID NO: 304;
the heavy chain comprises a sequence at least 80, 85, 90, 95, 97, 98, 99, or 100% identical to SEQ ID NO: 305, and the light chain comprises a sequence at least 80, 85, 90, 95, 97, 98, 99, or 100% identical to SEQ ID NO: 306;
the heavy chain comprises a sequence at least 80, 85, 90, 95, 97, 98, 99, or 100% identical to SEQ ID NO: 307, and the light chain comprises a sequence at least 80, 85, 90, 95, 97, 98, 99, or 100% identical to SEQ ID NO: 308;
the heavy chain comprises a sequence at least 80, 85, 90, 95, 97, 98, 99, or 100% identical to SEQ ID NO: 309, and the light chain comprises a sequence at least 80, 85, 90, 95, 97, 98, 99, or 100% identical to SEQ ID NO: 310;
the heavy chain comprises a sequence at least 80, 85, 90, 95, 97, 98, 99, or 100% identical to SEQ ID NO: 311, and the light chain comprises a sequence at least 80, 85, 90, 95, 97, 98, 99, or 100% identical to SEQ ID NO: 312;
the heavy chain comprises a sequence at least 80, 85, 90, 95, 97, 98, 99, or 100% identical to SEQ ID NO: 313, and the light chain comprises a sequence at least 80, 85, 90, 95, 97, 98, 99, or 100% identical to SEQ ID NO: 314;
the heavy chain comprises a sequence at least 80, 85, 90, 95, 97, 98, 99, or 100% identical to SEQ ID NO: 315, and the light chain comprises a sequence at least 80, 85, 90, 95, 97, 98, 99, or 100% identical to SEQ ID NO: 316;
the heavy chain comprises a sequence at least 80, 85, 90, 95, 97, 98, 99, or 100% identical to SEQ ID NO: 317, and the light chain comprises a sequence at least 80, 85, 90, 95, 97, 98, 99, or 100% identical to SEQ ID NO: 318;
the heavy chain comprises a sequence at least 80, 85, 90, 95, 97, 98, 99, or 100% identical to SEQ ID NO: 319, and the light chain comprises a sequence at least 80, 85, 90, 95, 97, 98, 99, or 100% identical to SEQ ID NO: 320;
the heavy chain comprises a sequence at least 80, 85, 90, 95, 97, 98, 99, or 100% identical to SEQ ID NO: 321, and the light chain comprises a sequence at least 80, 85, 90, 95, 97, 98, 99, or 100% identical to SEQ ID NO: 322;
the heavy chain comprises a sequence at least 80, 85, 90, 95, 97, 98, 99, or 100% identical to SEQ ID NO: 323, and the light chain comprises a sequence at least 80, 85, 90, 95, 97, 98, 99, or 100% identical to SEQ ID NO: 324;
the heavy chain comprises a sequence at least 80, 85, 90, 95, 97, 98, 99, or 100% identical to SEQ ID NO: 325, and the light chain comprises a sequence at least 80, 85, 90, 95, 97, 98, 99, or 100% identical to SEQ ID NO: 326;
the heavy chain comprises a sequence at least 80, 85, 90, 95, 97, 98, 99, or 100% identical to SEQ ID NO: 327, and the light chain comprises a sequence at least 80, 85, 90, 95, 97, 98, 99, or 100% identical to SEQ ID NO: 328;
the heavy chain comprises a sequence at least 80, 85, 90, 95, 97, 98, 99, or 100% identical to SEQ ID NO: 329, and the light chain comprises a sequence at least 80, 85, 90, 95, 97, 98, 99, or 100% identical to SEQ ID NO: 330;
the heavy chain comprises a sequence at least 80, 85, 90, 95, 97, 98, 99, or 100% identical to SEQ ID NO: 331, and the light chain comprises a sequence at least 80, 85, 90, 95, 97, 98, 99, or 100% identical to SEQ ID NO: 332;
the heavy chain comprises a sequence at least 80, 85, 90, 95, 97, 98, 99, or 100% identical to SEQ ID NO: 333, and the light chain comprises a sequence at least 80, 85, 90, 95, 97, 98, 99, or 100% identical to SEQ ID NO: 334;
the heavy chain comprises a sequence at least 80, 85, 90, 95, 97, 98, 99, or 100% identical to SEQ ID NO: 335, and the light chain comprises a sequence at least 80, 85, 90, 95, 97, 98, 99, or 100% identical to SEQ ID NO: 336;
the heavy chain comprises a sequence at least 80, 85, 90, 95, 97, 98, 99, or 100% identical to SEQ ID NO: 337, and the light chain comprises a sequence at least 80, 85, 90, 95, 97, 98, 99, or 100% identical to SEQ ID NO: 338;
the heavy chain comprises a sequence at least 80, 85, 90, 95, 97, 98, 99, or 100% identical to SEQ ID NO: 339, and the light chain comprises a sequence at least 80, 85, 90, 95, 97, 98, 99, or 100% identical to SEQ ID NO: 340;
the heavy chain comprises a sequence at least 80, 85, 90, 95, 97, 98, 99, or 100% identical to SEQ ID NO: 341, and the light chain comprises a sequence at least 80, 85, 90, 95, 97, 98, 99, or 100% identical to SEQ ID NO: 342;
the heavy chain comprises a sequence at least 80, 85, 90, 95, 97, 98, 99, or 100% identical to SEQ ID NO: 343, and the light chain comprises a sequence at least 80, 85, 90, 95, 97, 98, 99, or 100% identical to SEQ ID NO: 344;
the heavy chain comprises a sequence at least 80, 85, 90, 95, 97, 98, 99, or 100% identical to SEQ ID NO: 345, and the light chain comprises a sequence at least 80, 85, 90, 95, 97, 98, 99, or 100% identical to SEQ ID NO: 346;
the heavy chain comprises a sequence at least 80, 85, 90, 95, 97, 98, 99, or 100% identical to SEQ ID NO: 347, and the light chain comprises a sequence at least 80, 85, 90, 95, 97, 98, 99, or 100% identical to SEQ ID NO: 348;
the heavy chain comprises a sequence at least 80, 85, 90, 95, 97, 98, 99, or 100% identical to SEQ ID NO: 349, and the light chain comprises a sequence at least 80, 85, 90, 95, 97, 98, 99, or 100% identical to SEQ ID NO: 350;
the heavy chain comprises a sequence at least 80, 85, 90, 95, 97, 98, 99, or 100% identical to SEQ ID NO: 351, and the light chain comprises a sequence at least 80, 85, 90, 95, 97, 98, 99, or 100% identical to SEQ ID NO: 352;
the heavy chain comprises a sequence at least 80, 85, 90, 95, 97, 98, 99, or 100% identical to SEQ ID NO: 353, and the light chain comprises a sequence at least 80, 85, 90, 95, 97, 98, 99, or 100% identical to SEQ ID NO: 354; or
the heavy chain comprises a sequence at least 80, 85, 90, 95, 97, 98, 99, or 100% identical to SEQ ID NO: 355, and the light chain comprises a sequence at least 80, 85, 90, 95, 97, 98, 99, or 100% identical to SEQ ID NO: 356.

58. The isolated antibody, or antigen-binding fragment thereof, of any one of claims 54-57, comprising a V_{H} region or heavy chain comprising:
an HFR1 sequence selected from SEQ ID NOs: 357-361;
an HFR2 sequence selected from SEQ ID NOs: 362-366;
an HFR3 sequence selected from SEQ ID NOs: 367-369;
an HFR4 sequence set forth in SEQ ID NO: 370;
a V_{H}CDR1 sequence selected from SEQ ID NOs: 371-372;
a V_{H}CDR2 sequence selected from SEQ ID NOs: 373-374; and
a V_{H}CDR3 sequence selected from SEQ ID NO: 375,
and/or a V_{L} region or light chain comprising:
an LFR1 sequence set forth in SEQ ID NO: 376;
an LFR2 sequence set forth in SEQ ID NO: 377;
an LFR3 sequence set forth in SEQ ID NO: 378;
an LFR4 sequence set forth in SEQ ID NO: 379;
a V_{L}CDR1 sequence selected from SEQ ID NOs: 380-385;
a V_{L}CDR2 sequence set forth in SEQ ID NO: 386; and
a V_{L}CDR3 sequence selected from SEQ ID NOs: 387-388,
wherein the antibody, or antigen-binding fragment thereof, specifically binds to a human denatured collagen, or comprising:
an HFR1 sequence selected from SEQ ID NOs: 389-390;
an HFR2 sequence selected from SEQ ID NOs: 391-392;
an HFR3 sequence set forth in SEQ ID NO: 393;
an HFR4 sequence set forth in SEQ ID NO: 394;
a V_{H}CDR1 sequence selected from SEQ ID NOs: 395-397;
a V_{H}CDR2 sequence selected from SEQ ID NOs: 398-401; and
a V_{H}CDR3 sequence selected from SEQ ID NOs: 402-405,
and/or a VL region or light chain comprising:
an LFR1 sequence set forth in SEQ ID NO: 406;
an LFR2 sequence set forth in SEQ ID NO: 407;
an LFR3 sequence set forth in SEQ ID NO: 408;
an LFR4 sequence set forth in SEQ ID NO: 409;
a V_{L}CDR1 sequence selected from SEQ ID NOs: 410-412;
a V_{L}CDR2 set forth in SEQ ID NO: 413; and
a V_{L}CDR3 set forth in SEQ ID NO: 414,
wherein the antibody, or antigen-binding fragment thereof, specifically binds to a human denatured collagen.

59. The isolated antibody, or antigen-binding fragment thereof, of any one of claims 54-58, which preferentially binds to the denatured human collagen type I, II, III, IV, and/or V polypeptide relative to a corresponding native human collagen polypeptide, optionally wherein the antibody, or antigen-binding fragment thereof, has about or at least about 2, 3, 4, 5, 6, 7, 8, 9, 10, 15, 20, 25, 30, 35, 40, 50, 60, 70, 80, 90, or 100-fold higher binding affinity for the denatured human collagen polypeptide than it has for the corresponding native human collagen polypeptide.

60. The isolated antibody, or antigen-binding fragment thereof, of any one of claims 54-59, which specifically binds to the denatured human collagen type I, II, III, IV, and V polypeptides at the HU177 cryptic collagen epitope, optionally wherein the cryptic collagen epitope comprises PGXP (SEQ ID NO: 422), LPGXPG (SEQ ID NO: 423), and/or GPP′GXP′G (SEQ ID NO: 424), wherein X is any amino acid, and wherein P′ is hydroxylproline.

61. The isolated antibody, or antigen-binding fragment thereof, of any one of claims 54-58, which specifically binds to the denatured human collagen type IV polypeptide at the HUIV26 cryptic collagen epitope.

62. The isolated antibody, or antigen-binding fragment thereof, of any one of claims 54-61, which is a monoclonal antibody and/or a humanized antibody.

63. The isolated antibody, or antigen-binding fragment thereof, of any one of claims 54-62, which is a fragment antigen-binding domain (Fab), a F(ab′)2 domain, or a whole antibody.

64. The isolated antibody, or antigen-binding fragment thereof, of any one of claims 54-63, which is fused via an optional linker to an effector domain.

65. A recombinant nucleic acid molecule encoding the antibody, or antigen-binding fragment thereof, of any one of claims 54-64.

66. A vector comprising the recombinant nucleic acid molecule of claim 65.

67. A host cell comprising the recombinant nucleic acid molecule of claim 65 and/or the vector of claim 66.

68. A method of producing an antibody, or antigen-binding fragment thereof, comprising culturing the host cell of claim 67 under culture conditions suitable for the expression of the antibody, or antigen-binding fragment thereof, and isolating the antibody, or antigen-binding fragment thereof, from the culture.

69. A pharmaceutical or diagnostic composition, comprising the antibody, or antigen-binding fragment thereof, of any one of claims 54-64, and a pharmaceutically-acceptable carrier.
